(19) United States
(12) Patent Application Publication
(10) Pub. No.: US 2005/0130154 A1
(43) Pub. Date: Jun. 16, 2005

(54) Compositions and methods relating to endometrial specific genes and proteins

(76) Inventors: Yongming Sun, Redwood City, CA (US); Chenghua Liu, San Jose, CA (US)

Correspondence Address: LICATA & TYRRELL P.C., 66 E. MAIN STREET, MARLTON, NJ, 08053, US

(21) Appl. No.: 10/499,352

(22) PCT Filed: Dec. 23, 2002
(86) PCT No.: PCT/US02/41612

Related U.S. Application Data
(60) Provisional application No. 60/342,756, filed on Dec. 21, 2001.

(51) Int. Cl. C12Q 1/68; G01N 33/574; C07H 21/04; A61K 39/00; C12N 9/64

(52) U.S. Cl. 435/6; 435/7.23; 435/69.1; 435/226; 435/320.1; 435/325; 530/388.26; 536/23.2; 424/185.1

(57) ABSTRACT

The present invention relates to newly identified nucleic acid molecules and polypeptides present in normal and neoplastic endometrial cells, including fragments, variants and derivatives of the nucleic acids and polypeptides. The present invention also relates to antibodies to the polypeptides of the invention, as well as agonists and antagonists of the polypeptides of the invention. The invention also relates to compositions containing the nucleic acid molecules, polypeptides, antibodies, agonists and antagonists of the invention and methods for the use of these compositions. These uses include identifying, diagnosing, monitoring, staging, imaging and treating endometrial cancer and non-cancerous disease states in endometria, identifying endometrial tissue, monitoring and identifying and/or designing agonists and antagonists of polypeptides of the invention. The uses also include gene therapy, production of transgenic animals and cells, and production of engineered endometrial tissue for treatment and research.

[0001] This application claims the benefit of priority from U.S. Provisional Application No. 60/342,756, filed Dec. 21, 2001, which is herein incorporated by reference in its entirety.

### FIELD OF THE INVENTION

[0002] The present invention relates to newly identified nucleic acids and polypeptides present in normal and neoplastic endometrial cells, including fragments, variants and derivatives of the nucleic acids and polypeptides. The present invention also relates to antibodies to the polypeptides of the invention, as well as agonists and antagonists of the polypeptides of the invention. The invention also relates to compositions comprising the nucleic acids, polypeptides, antibodies, post translational modifications (PTMs), variants, derivatives, agonists and antagonists of the invention and methods for the use of these compositions. These uses include identifying, diagnosing, monitoring, staging, imaging and treating endometrial cancer and non-cancerous disease states in endometrial, identifying endometrial tissue and monitoring and identifying and/or designing agonists and antagonists of polypeptides of the invention. The uses also include gene therapy, therapeutic molecules including but limited to antibodies or antisense molecules, production of transgenic animals and cells, and production of engineered endometrial tissue for treatment and research.

### BACKGROUND OF THE INVENTION

[0003] Endometrial carcinoma (EC) is the foremost invasive neoplasm of the female pelvic genitalia in the United States. C. Paul Morrow & John P. Curtin, Etiology and Detection of Gynecologic Cancer, in Synopsis of Gynecologic Oncology 3 (C. Paul Morrow & John P. Curtin eds., 5th ed. 1998) [hereinafter Morrow & Curtin I]. Nearly 35,000 new cases were estimated for 1997, which is roughly the number of cases of cervical cancer and ovarian cancer combined. Id. EC occurs predominantly in post-menopausal women, with an average diagnosis age of 58 years; only 2 to 5 percent of cases are diagnosed in women under 40. Id. White women have a higher risk of EC than black women, with respective lifetime risks of 2.4 and 1.3. Id. Uterine sarcomas are far less common than carcinomas, accounting for only 4.3% of all uterine cancers. Id. at 5.

[0004] A number of risk factors have been associated with EC, foremost among them being excess estrogen, whether exogenously or endogenously derived. Chen, L. M. et al., Oncology 13(12): 1665-70 (1999); Greven, KM. & Corn, B. W., Curr. Probl. Cancer 21(2): 65-127 (1997). Other factors include obesity, late menopause, and radiation therapy. Morrow & Curtin I, supra at 4. Those patients with a history of breast, colon, or ovarian cancer, or a family history of EC, polycystic ovarian disease, hormonally active stromal tumors of the ovary, or hypothyroidism, all display an elevated risk of developing EC. Id. at 3-4. Factors which the reduce the risk of EC include combination oral contraceptives and curiously, smoking. Id. at 4.

[0005] From the standpoint of molecular biology, research has revealed an association between EC and a number of genetic mutations, including mutations in the K-ras and ERBB-2 protooncogenes, and the p53 tumor suppressor gene. Jeff Boyd, Molecular Genetics of Gynecologic Cancers, in Synopsis of Gynecologic Oncology 524-26 (C. Paul Morrow & John P. Curtin eds., 5th ed. 1998). Moreover, nearly all of the inherited endometrial cancers (no more than 5% of all cases), arise in the context of hereditary nonpolyposis colorectal cancer, which itself arises from mutations in the hMSH2, the hMLH1, or the hPMS2 genes. Id. at 519-20.

[0006] At present, no adequate mass screening techniques exist for detecting the presence of EC, and only 1 to 5% of women are diagnosed while asymptomatic. Morrow & Curtin I, supra at 10; C. Paul Morrow & John P. Curtin, Tumors of the Endometrium, in Synopsis of Gynecologic Oncology 157 (C. Paul Morrow & John P. Curtin eds., 5th ed. 1998) [hereinafter Morrow & Curtin II]. Current screening techniques are directed to those women who are symptomatic or fall into particularly high-risk categories, such as women who experience post-menopausal bleeding, a symptom experienced by more than 90% of post-menopausal women diagnosed with EC. Morrow & Curtin I, supra at 10; Morrow & Curtin II, supra at 157. For such women, endometrial biopsy is the routine course for diagnosis. Morrow & Curtin I, supra at 10; Walter J. Burdette, Cancer: Etiology. Diagnosis, and Treatment 162 (1998). The use of ultrasound to measure endometrial thickness has served as an effective complement to biopsy. Morrow & Curtin I, supra at 10. In cases where the endometrial “stripe” is greater than 10 mm in thickness, between 10 and 20% of patients experience carcinoma or hyperplasia, and thus should have an endometrial biopsy. Id. In some cases, cervical cytology leads to a diagnosis of EC, particularly where (1) a multitude of histiocytes are discovered in a postmenopausal smear, (2) endometrial cells with a “normal” appearance are found during the latter half of the menstrual cycle or after menopause, and (3) unusual or malignant glandular cells are discovered at any age. Id. at 10-11. While EC is commonly diagnosed at an early stage, and is thus considered among the most curable of the gynecologic cancers, those women who present at later stages or with unfavorable histologies suffer considerable morbidity and death. Yamada, S. D & McGonigle, K. F., Curr. Opin. Obstet. Gynecol. 10(1): 57-60 (1998).

[0007] Once EC has been diagnosed, the EC is surgically staged, which typically includes a hysterectomy and bilateral salpingo-oophorectomy. Chen et al., supra. One classification system commonly used to stage EC is the TNM system devised by the Union Internationale Contre le Cancer. AJCC Cancer Staging Handbook 3 (Irvin D. Fleming et al. eds., 5^{th} ed. 1998). This system is divided into several stages, each of which evaluates the extent of cancer growth with respect to primary tumor (T), regional lymph nodes (N), and distant metastasis (M). Id.

[0008] Stage 0 is characterized by carcinoma in situ (Tis), with no regional lymph node metastasis (N0) and no distant metastasis (M0). Id. at 184. Stages IA, IB, IC, IIA, and IIB differ from Stage 0 only in terms of tumor category. Id. at 184-85. Stage IA involves a tumor limited to the endometrium (T1a), StageIB is characterized by tumor invasion up to one-half of the myometrium (T1b), and Stage IC involves tumor invasion into more than one-half of the myometrium (T1c). Id. By contrast, Stage IIA involves invasion of the endocervical glands only (T2a), while Stage IIB involves invasion of the cervical stroma (T2b). Id. Stages IIIA and IIIB also differ from Stage 0 only with respect to tumor stage, with Stage IIIA being characterized by invasion into the serosa and/or adnexa (directly or by metastasis), and/or cancer cells being present in ascites or peritoneal washings (T3a), and with Stage IIIB involving the vagina (directly or by metastasis) (T3b). Id. Stage IIIC, however, involves any one of tumor categories T1, T2, T3a, T3b, regional lymph node metastasis (N1), but no distant metastasis (M0). Id. Stage IVA involves tumor invasion into the bladder mucosa and/or bowel mucosa (T4), any N category, but no distant metastasis (M0). Id. Lastly, stage IVB is characterized by any T category, any N category, and distant metastasis (M1). Id.

[0009] Turning to the treatment of EC, complete abdominal hysterectomy and bilateral salpingo-oophorectomy have been described as the “cornerstones” of EC therapy. Greven &. Corn, supra. Aside from surgery, irradiation is highly effective at treating EC, either alone or as part of an adjuvant regimen; indeed, some women who are unable to undergo conventional surgery are cured with radiation alone. Id.; Greven, K. M. et al., Int'l J. Radiat. Oncol. Biol. Phys. 39(2): 413-18 (1997). Physicians have also observed some positive responses to chemotherapy, with cisplatin, doxorubicin, paclitaxel, and progestins serving as the most effective systemic agents. Greven & Corn, supra, Chen et al., supra; Augustin A. Garcia & J. Tate Thigpen, Principles of Chemotherapy, in Synopsis of Gynecologic Oncology 427-29 (C. Paul Morrow & John P. Curtin eds., 5th ed. 1998). However, chemotherapy is generally of limited utility in treating EC, with responses typically being shortlived. Burdette, supra at 163.

[0010] From the foregoing, it is clear that procedures used for detecting, diagnosing, monitoring, staging, prognosticating, and preventing the recurrence of uterine cancer are of critical importance to the outcome of the patient. Moreover, current procedures, while helpful in each of these analyses, are limited by their specificity, sensitivity, invasiveness, and/or their cost. As such, highly specific and sensitive procedures that would operate by way of detecting novel markers in cells, tissues, or bodily fluids, with minimal invasiveness and at a reasonable cost, would be highly desirable.

[0011] Accordingly, there is a great need for more sensitive and accurate methods for predicting whether a person is likely to develop uterine cancer, for diagnosing uterine cancer, for monitoring the progression of the disease, for staging uterine cancer, for determining whether uterine cancer has metastasized, and for imaging uterine cancer. There is also a need for better treatment of uterine cancer.

### SUMMARY OF THE INVENTION

[0012] The present invention solves many needs in the art by providing nucleic acid molecules, polypeptides and antibodies thereto, variants and derivatives of the nucleic acids and polypeptides, agonists and antagonists that may be used to identify, diagnose, monitor, stage, image and treat endometrial cancer and non-cancerous disease states in endometrial; identify and monitor endometrial tissue; and identify and design agonists and antagonists of polypeptides of the invention. The invention also provides gene therapy, methods for producing transgenic animals and cells, and methods for producing engineered endometrial tissue for treatment and research.

[0013] One aspect of the present invention relates to nucleic acid molecules that are specific to endometrial cells, endometrial tissue and/or the endometrial organ. These endometrial specific nucleic acids (ESNAs) may be a naturally occurring cDNA, genomic DNA, RNA, or a fragment of one of these nucleic acids, or may be a non-naturally occurring nucleic acid molecule. If the ESNA is genomic DNA, then the ESNA is a endometrial specific gene (ESG). If the ESNA is RNA, then it is a endometrial specific transcript encoded by a ESG. Due to alternative splicing and transcriptional modification one ESG may encode for multiple endometrial specific RNAs. In a preferred embodiment, the nucleic acid molecule encodes a polypeptide that is specific to endometrial. More preferred is a nucleic acid molecule that encodes a polypeptide comprising an amino acid sequence of SEQ ID NO: 420-600. In another preferred embodiment, the nucleic acid molecule comprises a nucleic acid sequence of SEQ ID NO: 1-419. For the ESNA sequences listed herein, DEX0378_{—}001.nt.1 corresponds to SEQ ID NO: 1. For sequences with multiple splice variants, the parent sequence DEX0378_{—}001.nt.1, will be followed by DEX0378_{—}001.nt.2, etc. for each splice variant. The sequences off the corresponding peptides are listed as DEX0378_{—}001.aa.1, etc. For the mapping of all of the nucleotides and peptides, see the table in the Example 1 section below.

[0014] This aspect of the present invention also relates to nucleic acid molecules that selectively hybridize or exhibit substantial sequence similarity to nucleic acid molecules encoding a endometrial Specific Protein (ESP), or that selectively hybridize or exhibit substantial sequence similarity to a ESNA. In one embodiment of the present invention the nucleic acid molecule comprises an allelic variant of a nucleic acid molecule encoding a ESP, or an allelic variant of a ESNA. In another embodiment, the nucleic acid molecule comprises a part of a nucleic acid sequence that encodes a ESP or a part of a nucleic acid sequence of a ESNA.

[0015] In addition, this aspect of the present invention relates to a nucleic acid molecule further comprising one or more expression control sequences controlling the transcription and/or translation of all or a part of a ESNA or the transcription and/or translation of a nucleic acid molecule that encodes all or a fragment of a ESP.

[0016] Another aspect of the present invention relates to vectors and/or host cells comprising a nucleic acid molecule of this invention. In a preferred embodiment, the nucleic acid molecule of the vector and/or host cell encodes all or a fragment of a ESP. In another preferred embodiment, the nucleic acid molecule of the vector and/or host cell comprises all or a part of a ESNA. Vectors and host cells of the present invention are useful in the recombinant production of polypeptides, particularly ESPs of the present invention.

[0017] Another aspect of the present invention relates to polypeptides encoded by a nucleic acid molecule of this invention. The polypeptide may comprise either a fragment or a full-length protein. In a preferred embodiment, the polypeptide is a ESP. However, this aspect of the present invention also relates to mutant proteins (muteins) of ESPs, fusion proteins of which a portion is a ESP, and proteins and polypeptides encoded by allelic variants of a ESNA as provided herein.

[0018] Another aspect of the present invention relates to antibodies and other binders that specifically binds to a polypeptide of the instant invention. Accordingly antibodies or binders of the present specifically bind to ESPs, muteins, fusion proteins, and/or homologous proteins or a polypeptides encoded by allelic variants of an ESNA as provided herein.

[0019] Another aspect of the present invention relates to agonists and antagonists of the nucleic acid molecules and polypeptides of this invention. The agonists and antagonists of the instant invention may be used to treat endometrial cancer and non-cancerous disease states in endometrial and to produce engineered endometrial tissue.

[0020] Another aspect of the present invention relates to methods for using the nucleic acid molecules to detect or amplify nucleic acid molecules that have similar or identical nucleic acid sequences compared to the nucleic acid molecules described herein. Such methods are useful in identifying, diagnosing, monitoring, staging, imaging and treating endometrial cancer and non-cancerous disease states in endometrial. Such methods are also useful in identifying and/or monitoring endometrial tissue. In addition, measurement of levels of one or more of the nucleic acid molecules of this invention may be useful for diagnostics as part of panel in combination with known other markers, particularly those described in the endometrial cancer background section above.

[0021] Another aspect of the present invention relates to use of the nucleic acid molecules of this invention in gene therapy, for producing transgenic animals and cells, and for producing engineered endometrial tissue for treatment and research.

[0022] Another aspect of the present invention relates to methods for detecting polypeptides this invention, preferably using antibodies thereto. Such methods are useful to identify, diagnose, monitor, stage, image and treat endometrial cancer and non-cancerous disease states in endometrial. In addition, measurement of levels of one or more of the polypeptides of this invention may be useful to identify, diagnose, monitor, stage, image endometrial cancer in combination with known other markers, particularly those described in the endometrial cancer background section above. The polypeptides of the present invention can also be used to identify and/or monitor endometrial tissue, and to produce engineered endometrial tissue.

[0023] Yet another aspect of the present invention relates to a computer readable means of storing the nucleic acid and amino acid sequences of the invention. The records of the computer readable means can be accessed for reading and displaying of sequences for comparison, alignment and ordering of the sequences of the invention to other sequences. In addition, the computer records regarding the nucleic acid and/or amino acid sequences and/or measurements of their levels may be used alone or in combination with other markers to diagnose endometrial related diseases.

### DETAILED DESCRIPTION OF THE INVENTION

Definitions and General Techniques

[0024] Unless otherwise defined herein, scientific and technical terms used in connection with the present invention shall have the meanings that are commonly understood by those of ordinary skill in the art. Further, unless otherwise required by context, singular terms shall include pluralities and plural terms shall include the singular. Generally, nomenclatures used in connection with, and techniques of, cell and tissue culture, molecular biology, immunology, microbiology, genetics and protein and nucleic acid chemistry and hybridization described herein are those well known and commonly used in the art. The methods and techniques of the present invention are generally performed according to conventional methods well known in the art and as described in various general and more specific references that are cited and discussed throughout the present specification unless otherwise indicated. See, e.g., Sambrook et al., Molecular Cloning: A Laboratory Manual, 2d ed., Cold Spring Harbor Laboratory Press (1989) and Sambrook et al., Molecular Cloning: A Laboratory Manual, 3d ed., Cold Spring Harbor Press (2001); Ausubel et al., Current Protocols in Molecular Biology, Greene Publishing Associates (1992, and Supplements to 2000); Ausubel et al., Short Protocols in Molecular Biology: A Compendium of Methods from Current Protocols in Molecular Biology—4th Ed., Wiley & Sons (1999); Harlow and Lane, Antibodies: A Laboratory Manual, Cold Spring Harbor Laboratory Press (1990); and Harlow and Lane, Using Antibodies: A Laboratory Manual, Cold Spring Harbor Laboratory Press (1999).

[0025] Enzymatic reactions and purification techniques are performed according to manufacturer's specifications, as commonly accomplished in the art or as described herein. The nomenclatures used in connection with, and the laboratory procedures and techniques of, analytical chemistry, synthetic organic chemistry, and medicinal and pharmaceutical chemistry described herein are those well known and commonly used in the art. Standard techniques are used for chemical syntheses, chemical analyses, pharmaceutical preparation, formulation, and delivery, and treatment of patients.

[0026] The following terms, unless otherwise indicated, shall be understood to have the following meanings:

[0027] A “nucleic acid molecule” of this invention refers to a polymeric form of nucleotides and includes both sense and antisense strands of RNA, cDNA, genomic DNA, and synthetic forms and mixed polymers of the above. A nucleotide refers to a ribonucleotide, deoxynucleotide or a modified form of either type of nucleotide. A “nucleic acid molecule” as used herein is synonymous with “nucleic acid” and “polynucleotide.” The term “nucleic acid molecule” usually refers to a molecule of at least 10 bases in length, unless otherwise specified. The term includes single and double stranded forms of DNA. In addition, a polynucleotide may include either or both naturally occurring and modified nucleotides linked together by naturally occurring and/or non-naturally occurring nucleotide linkages.

[0028] Nucleotides are represented by single letter symbols in nucleic acid molecule sequences. The following table lists symbols identifying nucleotides or groups of nucleotides which may occupy the symbol position on a nucleic acid molecule. See Nomenclature Committee of the International Union of Biochemistry (NC-IUB), Nomenclature for incompletely specified bases in nucleic acid sequences, Recommendations 1984., Eur J Biochem. 150(1): 1-5 (1985).

| | | | Complementary |
|---|---|---|---|
| Symbol | Meaning | Group/Origin of Designation | Symbol |
| a | a | Adenine | t/u |
| g | g | Guanine | c |
| c | c | Cytosine | g |
| t | t | Thymine | a |
| u | u | Uracil | a |
| r | g or a | puRine | y |
| y | t/u or c | pYrimidine | r |
| m | a or c | aMino | k |
| k | g or t/u | Keto | m |
| s | g or c | Strong interactions 3H-bonds | w |
| w | a or t/u | Weak interactions 2H-bonds | s |
| b | g or c or t/u | not a | v |
| d | a or g or t/u | not c | h |
| h | a or c or t/u | not g | d |
| v | a or g or c | not t, not u | b |
| n | a or g or c | aNy | n |
| | or t/u, | | |
| | unknown, or | | |
| | other | | |

[0029] The nucleic acid molecules may be modified chemically or biochemically or may contain non-natural or derivatized nucleotide bases, as will be readily appreciated by those of skill in the art. Such modifications include, for example, labels, methylation, substitution of one or more of the naturally occurring nucleotides with an analog, internucleotide modifications such as uncharged linkages (e.g., methyl phosphonates, phosphotriesters, phosphoramidates, carbamates, etc.), charged linkages (e.g., phosphorothioates, phosphorodithioates, etc.), pendent moieties (e.g., polypeptides), intercalators (e.g., acridine, psoralen, etc.), chelators, alkylators, and modified linkages (e.g., alpha anomeric nucleic acids, etc.) The term “nucleic acid molecule” also includes any topological conformation, including single-stranded, double-stranded, partially duplexed, triplexed, hairpinned, circular and padlocked conformations. Also included are synthetic molecules that mimic polynucleotides in their ability to bind to a designated sequence via hydrogen bonding and other chemical interactions. Such molecules are known in the art and include, for example, those in which peptide linkages substitute ior phosphate linkages in the backbone of the molecule.

[0030] A “gene” is defined as a nucleic acid molecule that comprises a nucleic acid sequence that encodes a polypeptide and the expression control sequences that surround the nucleic acid sequence that encodes the polypeptide. For instance, a gene may comprise a promoter, one or more enhancers, a nucleic acid sequence that encodes a polypeptide, downstream regulatory sequences and, possibly, other nucleic acid sequences involved in regulation of the expression of an RNA. As is well known in the art, eukaryotic genes usually contain both exons and introns. The term “exon” refers to a nucleic acid sequence found in genomic DNA that is bioinformatically predicted and/or experimentally confirmed to contribute contiguous sequence to a mature mRNA transcript. The term “intron” refers to a nucleic acid sequence found in genomic DNA that is predicted and/or confirmed to not contribute to a mature mRNA transcript, but rather to be “spliced out” during processing of the transcript.

[0031] A nucleic acid molecule or polypeptide is “derived” from a particular species if the nucleic acid molecule or polypeptide has been isolated from the particular species, or if the nucleic acid molecule or polypeptide is homologous to a nucleic acid molecule or polypeptide isolated from a particular species.

[0032] An “isolated” or “substantially pure” nucleic acid or polynucleotide (e.g., an RNA, DNA or a mixed polymer) is one which is substantially separated from other cellular components that naturally accompany the native polynucleotide in its natural host cell, e.g., ribosomes, polymerases, or genomic sequences with which it is naturally associated. The term embraces a nucleic acid or polynucleotide that (1) has been removed from its naturally occurring environment, (2) is not associated with all or a portion of a polynucleotide in which the “isolated polynucleotide” is found in nature, (3) is operatively linked to a polynucleotide which it is not linked to in nature, (4) does not occur in nature as part of a larger sequence or (5) includes nucleotides or internucleoside bonds that are not found in nature. The term “isolated” or “substantially pure” also can be used in reference to recombinant or cloned DNA isolates, chemically synthesized polynucleotide analogs, or polynucleotide analogs that are biologically synthesized by heterologous systems. The term “isolated nucleic acid molecule” includes nucleic acid molecules that are integrated into a host cell chromosome at a heterologous site, recombinant fusions of a native fragment to a heterologous sequence, recombinant vectors present as episomes or as integrated into a host cell chromosome.

[0033] A “part” of a nucleic acid molecule refers to a nucleic acid molecule that comprises a partial contiguous sequence of at least 10 bases of the reference nucleic acid molecule. Preferably, a part comprises at least 15 to 20 bases of a reference nucleic acid molecule. In theory, a nucleic acid sequence of 17 nucleotides is of sufficient length to occur at random less frequently than once in the three gigabase human genome, and thus to provide a nucleic acid probe that can uniquely identify the reference sequence in a nucleic acid mixture of genomic complexity. A preferred part is one that comprises a nucleic acid sequence that can encode at least 6 contiguous amino acid sequences (fragments of at least 18 nucleotides) because they are useful in directing the expression or synthesis of peptides that are useful in mapping the epitopes of the polypeptide encoded by the reference nucleic acid. See, e.g., Geysen et al., Proc. Natl. Acad. Sci. USA 81: 3998-4002 (1984); and U.S. Pat. Nos. 4,708,871 and 5,595,915, the disclosures of which are incorporated herein by reference in their entireties. A part may also comprise at least 25, 30, 35 or 40 nucleotides of a reference nucleic acid molecule, or at least 50, 60, 70, 80, 90, 100, 150, 200, 250, 300, 350, 400 or 500 nucleotides of a reference nucleic acid molecule. A part of a nucleic acid molecule may comprise no other nucleic acid sequences. Alternatively, a part of a nucleic acid may comprise other nucleic acid sequences from other nucleic acid molecules.

[0034] The term “oligonucleotide” refers to a nucleic acid molecule generally comprising a length of 200 bases or fewer. The term often refers to single-stranded deoxyribonucleotides, but it can refer as well to single-or double-stranded ribonucleotides, RNA:DNA hybrids and double-stranded DNAs, among others. Preferably, oligonucleotides are 10 to 60 bases in length and most preferably 12, 13, 14, 15, 16, 17, 18, 19 or 20 bases in length. Other preferred oligonucleotides are 25, 30, 35, 40, 45, 50, 55 or 60 bases in length. Oligonucleotides may be single-stranded, e.g. for use as probes or primers, or may be double-stranded, e.g. for use in the construction of a mutant gene. Oligonucleotides of the invention can be either sense or antisense oligonucleotides. An oligonucleotide can be derivatized or modified as discussed above for nucleic acid molecules.

[0035] Oligonucleotides, such as single-stranded DNA probe oligonucleotides, often are synthesized by chemical methods, such as those implemented on automated oligonucleotide synthesizers. However, oligonucleotides can be made by a variety of other methods, including in vitro recombinant DNA-mediated techniques and by expression of DNAs in cells and organisms. Initially, chemically synthesized DNAs typically are obtained without a 5′ phosphate. The 5′ ends of such oligonucleotides are not substrates for phosphodiester bond formation by ligation reactions that employ DNA ligases typically used to form recombinant DNA molecules. Where ligation of such oligonucleotides is desired, a phosphate can be added by standard techniques, such as those that employ a kinase and ATP. The 3′ end of a chemically synthesized oligonucleotide generally has a free hydroxyl group and, in the presence of a ligase, such as T4 DNA ligase, readily will form a phosphodiester bond with a 5′ phosphate of another polynucleotide, such as another oligonucleotide. As is well known, this reaction can be prevented selectively, where desired, by removing the 5′ phosphates of the other polynucleotide(s) prior to ligation.

[0036] The term “naturally occurring nucleotide” referred to herein includes naturally occurring deoxyribonucleotides and ribonucleotides. The term “modified nucleotides” referred to herein includes nucleotides with modified or substituted sugar groups and the like. The term “nucleotide linkages” referred to herein includes nucleotides linkages such as phosphorothioate, phosphorodithioate, phosphoroselenoate, phosphorodiselenoate, phosphoroanilothioate, phoshoraniladate, phosphoroamidate, and the like. See e.g., LaPlanche et al. Nucl. Acids Res. 14:9081-9093 (1986); Stein et al. Nucl. Acids Res. 16:3209-3221 (1988); Zon et al. Anti-Cancer Drug Design 6:539-568 (1991); Zon et al., in Eckstein (ed.) Oligonucleotides and Analogues: A Practical Approach, pp. 87-108, Oxford University Press (1991); Uhlmann and Peyman Chemical Reviews 90:543 (1990), and U.S. Pat. No. 5,151,510, the disclosure of which is hereby incorporated by reference in its entirety.

[0037] Unless specified otherwise, the left hand end of a polynucleotide sequence in sense orientation is the 5′ end and the right hand end of the sequence is the 3′ end. In addition, the left hand direction of a polynucleotide sequence in sense orientation is referred to as the 5′ direction, while the right hand direction of the polynucleotide sequence is referred to as the 3′ direction. Further, unless otherwise indicated, each nucleotide sequence is set forth herein as a sequence of deoxyribonucleotides. It is intended, however, that the given sequence be interpreted as would be appropriate to the polynucleotide composition: for example, if the isolated nucleic acid is composed of RNA, the given sequence intends ribonucleotides, with uridine substituted for thymidine.

[0038] The term “allelic variant” refers to one of two or more alternative naturally occurring forms of a gene, wherein each gene possesses a unique nucleotide sequence. In a preferred embodiment, different alleles of a given gene have similar or identical biological properties.

[0039] The term “percent sequence identity” in the context of nucleic acid sequences refers to the residues in two sequences which are the same when aligned for maximum correspondence. The length of sequence identity comparison may be over a stretch of at least about nine nucleotides, usually at least about 20 nucleotides, more usually at least about 24 nucleotides, typically at least about 28 nucleotides, more typically at least about 32 nucleotides, and preferably at least about 36 or more nucleotides. There are a number of different algorithms known in the art which can be used to measure nucleotide sequence identity. For instance, polynucleotide sequences can be compared using FASTA, Gap or Bestfit, which are programs in Wisconsin Package Version 10.0, Genetics Computer Group (GCG), Madison, Wis. FASTA, which includes, e.g., the programs FASTA2 and FASTA3, provides alignments and percent sequence identity of the regions of the best overlap between the query and search sequences (Pearson, Methods Enzymol. 183: 63-98 (1990); Pearson, Methods Mol. Biol. 132: 185-219 (2000); Pearson, Methods Enzymol. 266: 227-258 (1996); Pearson, J. Mol. Biol. 276: 71-84 (1998)). Unless otherwise specified, default parameters for a particular program or algorithm are used. For instance, percent sequence identity between nucleic acid sequences can be determined using FASTA with its default parameters (a word size of 6 and the NOPAM factor for the scoring matrix) or using Gap with its default parameters as provided in GCG Version 6.1.

[0040] A reference to a nucleic acid sequence encompasses its complement unless otherwise specified. Thus, a reference to a nucleic acid molecule having a particular sequence should be understood to encompass its complementary strand, with its complementary sequence. The complementary strand is also useful, e.g., for antisense therapy, double stranded RNA (dsRNA) inhibition (RNAi), combination of triplex and antisense, hybridization probes and PCR primers.

[0041] In the molecular biology art, researchers use the terms “percent sequence identity”, “percent sequence similarity” and “percent sequence homology” interchangeably. In this application, these terms shall have the same meaning with respect to nucleic acid sequences only.

[0042] The term “substantial similarity” or “substantial sequence similarity,” when referring to a nucleic acid or fragment thereof, indicates that, when optimally aligned with appropriate nucleotide insertions or deletions with another nucleic acid (or its complementary strand), there is nucleotide sequence identity in at least about 50%, more preferably 60% of the nucleotide bases, usually at least about 70%, more usually at least about 80%, preferably at least about 90%, and more preferably at least about 95-98% of the nucleotide bases, as measured by any well known algorithm of sequence identity, such as FASTA, BLAST or Gap, as discussed above.

[0043] Alternatively, substantial similarity exists between a first and second nucleic acid sequence when the first nucleic acid sequence or fragment thereof hybridizes to an antisense strand of the second nucleic acid, under selective hybridization conditions. Typically, selective hybridization will occur between the first nucleic acid sequence and an antisense strand of the second nucleic acid sequence when there is at least about 55% sequence identity between the first and second nucleic acid sequences-preferably at least about 65%, more preferably at least about 75%, and most preferably at least about 90%—over a stretch of at least about 14 nucleotides, more preferably at least 17 nucleotides, even more preferably at least 20, 25, 30, 35, 40, 50, 60, 70, 80, 90 or 100 nucleotides.

[0044] Nucleic acid hybridization will be affected by such conditions as salt concentration, temperature, solvents, the base composition of the hybridizing species, length of the complementary regions, and the number of nucleotide base mismatches between the hybridizing nucleic acids, as will be readily appreciated by those skilled in the art. “Stringent hybridization conditions” and “stringent wash conditions” in the context of nucleic acid hybridization experiments depend upon a number of different physical parameters. The most important parameters include temperature of hybridization, base composition of the nucleic acids, salt concentration and length of the nucleic acid. One having ordinary skill in the art knows how to vary these parameters to achieve a particular stringency of hybridization. In general, “stringent hybridization” is performed at about 25° C. below the thermal melting point (Tₘ) for the specific DNA hybrid under a particular set of conditions. “Stringent washing” is performed at temperatures about 5° C. lower than the Tₘ for the specific DNA hybrid under a particular set of conditions. The Tₘ is the temperature at which 50% of the target sequence hybridizes to a perfectly matched probe. See Sambrook (1989), supra, p. 9.51.

[0045] The Tₘ for a particular DNA-DNA hybrid can be estimated by the formula:
[0046] Tₘ=81.5° C.+16.6 (log₁₀[Na⁺])+0.41 (fraction G+C)−0.63 (% formamide)−(600/1) where 1 is the length of the hybrid in base pairs.

[0047] The Tₘ for a particular RNA-RNA hybrid can be estimated by the formula:
[0048] Tₘ=79.8° C.+18.5 (log₁₀[Na⁺])+0.58 (fraction G+C)+11.8 (fraction G+C)²−0.35 (% formamide)−(820/1).

[0049] The Tₘ for a particular RNA-DNA hybrid can be estimated by the formula:
[0050] Tₘ=79.8° C.+18.5(log₁₀[Na⁺])+0.58 (fraction G+C)+11.8 (fraction G+C)²−0.50 (% formamide)−(820/1).

[0051] In general, the Tₘ decreases by 1-1.5° C. for each 1% of mismatch between two nucleic acid sequences. Thus, one having ordinary skill in the art can alter hybridization and/or washing conditions to obtain sequences that have higher or lower degrees of sequence identity to the target nucleic acid. For instance, to obtain hybridizing nucleic acids that contain up to 10% mismatch from the target nucleic acid sequence, 10-15° C. would be subtracted from the calculated Tₘ of a perfectly matched hybrid, and then the hybridization and washing temperatures adjusted accordingly. Probe sequences may also hybridize specifically to duplex DNA under certain conditions to form triplex or other higher order DNA complexes. The preparation of such probes and suitable hybridization conditions are well known in the art.

[0052] An example of stringent hybridization conditions for hybridization of complementary nucleic acid sequences having more than 100 complementary residues on a filter in a Southern or Northern blot or for screening a library is 50% formamide/6×SSC at 42° C. for at least ten hours and preferably overnight (approximately 16 hours). Another example of stringent hybridization conditions is 6×SSC at 68° C. without formamide for at least ten hours and preferably overnight. An example of moderate stringency hybridization conditions is 6×SSC at 55° C. without formamide for at least ten hours and preferably overnight. An example of low stringency hybridization conditions for hybridization of complementary nucleic acid sequences having more than 100 complementary residues on a filter in a Southern or northern blot or for screening a library is 6×SSC at 42° C. for at least ten hours. Hybridization conditions to identify nucleic acid sequences that are similar but not identical can be identified by experimentally changing the hybridization temperature from 68° C. to 42° C. while keeping the salt concentration constant (6×SSC), or keeping the hybridization temperature and salt concentration constant (e.g. 42° C. and 6×SSC) and varying the formamide concentration from 50% to 0%. Hybridization buffers may also include blocking agents to lower background. These agents are well known in the art. See Sambrook et al. (1989), supra, pages 8.46 and 9.46-9.58. See also Ausubel (1992), supra, Ausubel (1999), supra, and Sambrook (2001), supra.

[0053] Wash conditions also can be altered to change stringency conditions. An example of stringent wash conditions is a 0.2×SSC wash at 65° C. for 15 minutes (see Sambrook (1989), supra, for SSC buffer). Often the high stringency wash is preceded by a low stringency wash to remove excess probe. An exemplary medium stringency wash for duplex DNA of more than 100 base pairs is 1×SSC at 45° C. for 15 minutes. An exemplary low stringency wash for such a duplex is 4×SSC at 40° C. for 15 minutes. In general, signal-to-noise ratio of 2× or higher than that observed for an unrelated probe in the particular hybridization assay indicates detection of a specific hybridization.

[0054] As defined herein, nucleic acids that do not hybridize to each other under stringent conditions are still substantially similar to one another if they encode polypeptides that are substantially identical to each other. This occurs, for example, when a nucleic acid is created synthetically or recombinantly using a high codon degeneracy as permitted by the redundancy of the genetic code.

[0055] Hybridization conditions for nucleic acid molecules that are shorter than 100 nucleotides in length (e.g., for oligonucleotide probes) may be calculated by the formula:

[0056] Tₘ=81.5° C.+16.6(log₁₀[Na⁺])+0.41(fraction G+C)−(600/N), wherein N is change length and the [Na⁺] is 1 M or less. See Sambrook (1989), supra, p. 11.46. For hybridization of probes shorter than 100 nucleotides, hybridization is usually performed under stringent conditions (5-10° C. below the Tₘ) using high concentrations (0.1-1.0 pmol/ml) of probe. Id. at p. 11.45. Determination of hybridization using mismatched probes, pools of degenerate probes or “guessmers,” as well as hybridization solutions and methods for empirically determining hybridization conditions are well known in the art. See, e.g., Ausubel (1999), supra; Sambrook (1989), supra, pp. 11.45-11.57.

[0057] The term “digestion” or “digestion of DNA” refers to catalytic cleavage of the DNA with a restriction enzyme that acts only at certain sequences in the DNA. The various restriction enzymes referred to herein are commercially available and their reaction conditions, cofactors and other requirements for use are known and routine to the skilled artisan. For analytical purposes, typically, 1 μg of plasmid or DNA fragment is digested with about 2 units of enzyme in about 20 μl of reaction buffer. For the purpose of isolating DNA fragments for plasmid construction, typically 5 to 50 μg of DNA are digested with 20 to 250 units of enzyme in proportionately larger volumes. Appropriate buffers and substrate amounts for particular restriction enzymes are described in standard laboratory manuals, such as those referenced below, and are specified by commercial suppliers. Incubation times of about 1 hour at 37° C. are ordinarily used, but conditions may vary in accordance with standard procedures, the supplier's instructions and the particulars of the reaction. After digestion, reactions may be analyzed, and fragments may be purified by electrophoresis through an agarose or polyacrylamide gel, using well known methods that are routine for those skilled in the art.

[0058] The term “ligation” refers to the process of forming phosphodiester bonds between two or more polynucleotides, which most often are double-stranded DNAs. Techniques for ligation are well known to the art and protocols for ligation are described in standard laboratory manuals and references, such as, e.g., Sambrook (1989), supra.

[0059] Genome-derived “single exon probes,” are probes that comprise at least part of an exon (“reference exon”) and can hybridize detectably under high stringency conditions to transcript-derived nucleic acids that include the reference exon but do not hybridize detectably under high stringency conditions to nucleic acids that lack the reference exon. Single exon probes typically further comprise, contiguous to a first end of the exon portion, a first intronic and/or intergenic sequence that is identically contiguous to the exon in the genome, and may contain a second intronic and/or intergenic sequence that is identically contiguous to the exon in the genome. The minimum length of genome-derived single exon probes is defined by the requirement that the exonic portion be of sufficient length to hybridize under high stringency conditions to transcript-derived nucleic acids, as discussed above. The maximum length of genome-derived single exon probes is defined by the requirement that the probes contain portions of no more than one exon. The single exon probes may contain priming sequences not found in contiguity with the rest of the probe sequence in the genome, which priming sequences are useful for PCR and other amplification-based technologies. In another aspect, the invention is directed to single exon probes based on the ESNAs disclosed herein.

[0060] In one embodiment, the term “microarray” refers to a “nucleic acid microarray” having a substrate-bound plurality of nucleic acids, hybridization to each of the plurality of bound nucleic acids being separately detectable. The substrate can be solid or porous, planar or non-planar, unitary or distributed. Nucleic acid microarrays include all the devices so called in Schena (ed.), DNA Microarrays: A Practical Approach (Practical Approach Series), Oxford University Press (1999); Nature Genet. 21(1)(suppl.): 1-60 (1999); Schena (ed.), Microarray Biochip: Tools and Technology, Eaton Publishing Company/BioTechniques Books Division (2000). Additionally, these nucleic acid microarrays include substrate-bound plurality of nucleic acids in which the plurality of nucleic acids are disposed on a plurality of beads, rather than on a unitary planar substrate, as is described, inter alia, in Brenner et al., Proc. Natl. Acad. Sci USA 97(4): 1665-1670 (2000). Examples of nucleic acid microarrays may be found in U.S. Pat. Nos. 6,391,623, 6,383,754, 6,383,749, 6,380,377, 6,379,897, 6,376,191, 6,372,431, 6,351,712 6,344,316, 6,316,193, 6,312,906, 6,309,828, 6,309,824, 6,306,643, 6,300,063, 6,287,850, 6,284,497, 6,284,465, 6,280,954, 6,262,216, 6,251,601, 6,245,518, 6,263,287, 6,251,601, 6,238,866, 6,228,575, 6,214,587, 6,203,989, 6,171,797, 6,103,474, 6,083,726, 6,054,274, 6,040,138, 6,083,726, 6,004,755, 6,001,309, 5,958,342, 5,952,180, 5,936,731, 5,843,655, 5,814,454, 5,837,196, 5,436,327, 5,412,087, 5,405,783, the disclosures of which are incorporated herein by reference in their entireties.

[0061] In an alternative embodiment, a “microarray” may also refer to a “peptide microarray” or “protein microarray” having a substrate-bound collection of plurality of polypeptides, the binding to each of the plurality of bound polypeptides being separately detectable. Alternatively, the peptide microarray, may have a plurality of binders, including but not limited to monoclonal antibodies, polyclonal antibodies, phage display binders, yeast 2 hybrid binders, aptamers, which can specifically detect the binding of the polypeptides of this invention. The array may be based on autoantibody detection to the polypeptides of this invention, see Robinson et al., Nature Medicine 8(3):295-301 (2002). Examples of peptide arrays may be found in WO 02/31463, WO 02/25288, WO 01/94946, WO 01/88162, WO 01/68671, WO 01/57259, WO 00/61806, WO 00/54046, WO 00/47774, WO 99/40434, WO 99/39210, WO 97/42507 and U.S. Pat. Nos. 6,268,210, 5,766,960, 5,143,854, the disclosures of which are incorporated herein by reference in their entireties.

[0062] In addition, determination of the levels of the ESNA or ESP may be made in a multiplex manner using techniques described in WO 02/29109, WO 02/24959, WO 01/83502, WO01/73113, WO 01/59432, WO 01/57269, WO 99/67641, the disclosures of which are incorporated herein by reference in their entireties.

[0063] The term “mutant”, “mutated”, or “mutation” when applied to nucleic acid sequences means that nucleotides in a nucleic acid sequence may be inserted, deleted or changed compared to a reference nucleic acid sequence. A single alteration may be made at a locus (a point mutation) or multiple nucleotides may be inserted, deleted or changed at a single locus. In addition, one or more alterations may be made at any number of loci within a nucleic acid sequence. In a preferred embodiment of the present invention, the nucleic acid sequence is the wild type nucleic acid sequence encoding a ESP or is a ESNA. The nucleic acid sequence may be mutated by any method known in the art including those mutagenesis techniques described infra.

[0064] The term “error-prone PCR” refers to a process for performing PCR under conditions where the copying fidelity of the DNA polymerase is low, such that a high rate of point mutations is obtained along the entire length of the PCR product. See, e.g., Leung et al., Technique 1: 11-15 (1989) and Caldwell et al., PCR Methods Applic. 2: 28-33 (1992).

[0065] The term “oligonucleotide-directed mutagenesis” refers to a process which enables the generation of site-specific mutations in any cloned DNA segment of interest. See, e.g., Reidhaar-Olson et al., Science 241: 53-57 (1988).

[0066] The term “assembly PCR” refers to a process which involves the assembly of a PCR product from a mixture of small DNA fragments. A large number of different PCR reactions occur in parallel in the same vial, with the products of one reaction priming the products of another reaction.

[0067] The term “sexual PCR mutagenesis” or “DNA shuffling” refers to a method of error-prone PCR coupled with forced homologous recombination between DNA molecules of different but highly related DNA sequence in vitro, caused by random fragmentation of the DNA molecule based on sequence similarity, followed by fixation of the crossover by primer extension in an error-prone PCR reaction. See, e.g. Stemmer, Proc. Natl. Acad. Sci. U.S.A. 91: 10747-10751(1994). DNA shuffling can be carried out between several related genes (“Family shuffling”).

[0068] The term “in vivo mutagenesis” refers to a process of generating random mutations in any cloned DNA of interest which involves the propagation of the DNA in a strain of bacteria such as E. coli that carries mutations in one or more of the DNA repair pathways. These “mutator” strains have a higher random mutation rate than that of a wild-type parent. Propagating the DNA in a mutator strain will eventually generate random mutations within the DNA.

[0069] The term “cassette mutagenesis” refers to any process for replacing a small region of a double-stranded DNA molecule with a synthetic oligonucleotide “cassette” that differs from the native sequence. The oligonucleotide often contains completely and/or partially randomized native sequence.

[0070] The term “recursive ensemble mutagenesis” refers to an algorithm for protein engineering (protein mutagenesis) developed to produce diverse populations of phenotypically related mutants whose members differ in amino acid sequence. This method uses a feedback mechanism to control successive rounds of combinatorial cassette mutagenesis. See, e.g., Arkin et al., Proc. Natl. Acad. Sci. U.S.A. 89: 7811-7815 (1992).

[0071] The term “exponential ensemble mutagenesis” refers to a process for generating combinatorial libraries with a high percentage of unique and functional mutants, wherein small groups of residues are randomized in parallel to identify, at each altered position, amino acids which lead to functional proteins. See, e.g., Delegrave et al., Biotechnology Research 11: 1548-1552 (1993); Arnold, Current Opinion in Biotechnology 4: 450-455 (1993).

[0072] “Operatively linked” expression control sequences refers to a linkage in which the expression control sequence is either contiguous with the gene of interest to control the gene of interest, or acts in trans or at a distance to control the gene of interest.

[0073] The term “expression control sequence” as used herein refers to polynucleotide sequences which are necessary to affect the expression of coding sequences to which they are operatively linked. Expression control sequences are sequences which control the transcription, post-transcriptional events and translation of nucleic acid sequences. Expression control sequences include appropriate transcription initiation, termination, promoter and enhancer sequences; efficient RNA processing signals such as splicing and polyadenylation signals; sequences that stabilize cytoplasmic mRNA; sequences that enhance translation efficiency (e.g., ribosome binding sites); sequences that enhance protein stability; and when desired, sequences that enhance protein secretion. The nature of such control sequences differs depending upon the host organism; in prokaryotes, such control sequences generally include promoter, ribosomal binding site, and transcription termination sequence. The term “control sequences” is intended to include, at a minimum, all components whose presence is essential for expression, and can also include additional components whose presence is advantageous, for example, leader sequences and fusion partner sequences.

[0074] The term “vector,” as used herein, is intended to refer to a nucleic acid molecule capable of transporting another nucleic acid to which it has been linked. One type of vector is a “plasmid”, which refers to a circular double stranded DNA loop into which additional DNA segments may be ligated. Other vectors include cosmids, bacterial artificial chromosomes (BAC) and yeast artificial chromosomes (YAC). Another type of vector is a viral vector, wherein additional DNA segments may be ligated into the viral genome. Viral vectors that infect bacterial cells are referred to as bacteriophages. Certain vectors are capable of autonomous replication in a host cell into which they are introduced (e.g., bacterial vectors having a bacterial origin of replication). Other vectors can be integrated into the genome of a host cell upon introduction into the host cell, and thereby are replicated along with the host genome. Moreover, certain vectors are capable of directing the expression of genes to which they are operatively linked. Such vectors are referred to herein as “recombinant expression vectors” (or simply, “expression vectors”). In general, expression vectors of utility in recombinant DNA techniques are often in the form of plasmids. In the present specification, “plasmid” and “vector” may be used interchangeably as the plasmid is the most commonly used form of vector. However, the invention is intended to include other forms of expression vectors that serve equivalent functions.

[0075] The term “recombinant host cell” (or simply “host cell”), as used herein, is intended to refer to a cell into which a recombinant expression vector has been introduced. It should be understood that such terms are intended to refer not only to the particular subject cell but to the progeny of such a cell. Because certain modifications may occur in succeeding generations due to either mutation or environmental influences, such progeny may not, in fact, be identical to the parent cell, but are still included within the scope of the term “host cell” as used herein.

[0076] As used herein, the phrase “open reading frame” and the equivalent acronym “ORF” refers to that portion of a transcript-derived nucleic acid that can be translated in its entirety into a sequence of contiguous amino acids. As so defined, an ORF has length, measured in nucleotides, exactly divisible by 3. As so defined, an ORF need not encode the entirety of a natural protein.

[0077] As used herein, the phrase “ORF-encoded peptide” refers to the predicted or actual translation of an ORF.

[0078] As used herein, the phrase “degenerate variant” of a reference nucleic acid sequence is meant to be inclusive of all nucleic acid sequences that can be directly translated, using the standard genetic code, to provide an amino acid sequence identical to that translated from the reference nucleic acid sequence.

[0079] The term “polypeptide” encompasses both naturally occurring and non-naturally occurring proteins and polypeptides, as well as polypeptide fragments and polypeptide mutants, derivatives and analogs thereof. A polypeptide may be monomeric or polymeric. Further, a polypeptide may comprise a number of different modules within a single polypeptide each of which has one or more distinct activities. A preferred polypeptide in accordance with the invention comprises a ESP encoded by a nucleic acid molecule of the instant invention, or a fragment, mutant, analog and derivative thereof.

[0080] The term “isolated protein” or “isolated polypeptide” is a protein or polypeptide that by virtue of its origin or source of derivation (1) is not associated with naturally associated components that accompany it in its native state, (2) is free of other proteins from the same species (3) is expressed by a cell from a different species, or (4) does not occur in nature. Thus, a polypeptide that is chemically synthesized or synthesized in a cellular system different from the cell from which it naturally originates will be “isolated” from its naturally associated components. A polypeptide or protein may also be rendered substantially free of naturally associated components by isolation, using protein purification techniques well known in the art.

[0081] A protein or polypeptide is “substantially pure,” “substantially homogeneous” or “substantially purified” when at least about 60% to 75% of a sample exhibits a single species of polypeptide. The polypeptide or protein may be monomeric or multimeric. A substantially pure polypeptide or protein will typically comprise about 50%, 60%, 70%, 80% or 90% W/W of a protein sample, more usually about 95%, and preferably will be over 99% pure. Protein purity or homogeneity may be determined by a number of means well known in the art, such as polyacrylamide gel electrophoresis of a protein sample, followed by visualizing a single polypeptide band upon staining the gel with a stain well known in the art. For certain purposes, higher resolution may be provided by using HPLC or other means well known in the art for purification.

[0082] The term “fragment” when used herein with respect to polypeptides of the present invention refers to a polypeptide that has an amino-terminal and/or carboxy-terminal deletion compared to a full-length ESP. In a preferred embodiment, the fragment is a contiguous sequence in which the amino acid sequence of the fragment is identical to the corresponding positions in the naturally occurring polypeptide. Fragments typically are at least 5, 6, 7, 8, 9 or 10 amino acids long, preferably at least 12, 14, 16 or 18 amino acids long, more preferably at least 20 amino acids long, more preferably at least 25, 30, 35, 40 or 45, amino acids, even more preferably at least 50 or 60 amino acids long, and even more preferably at least 70 amino acids long.

[0083] A “derivative” when used herein with respect to polypeptides of the present invention refers to a polypeptide which is substantially similar in primary structural sequence to a ESP but which include, e.g., in vivo or in vitro chemical and biochemical modifications that are not found in the ESP. Such modifications include, for example, acetylation, acylation, ADP-ribosylation, amidation, covalent attachment of flavin, covalent attachment of a heme moiety, covalent attachment of a nucleotide or nucleotide derivative, covalent attachment of a lipid or lipid derivative, covalent attachment of phosphotidylinositol, cross-linking, cyclization, disulfide bond formation, demethylation, formation of covalent cross-links, formation of cystine, formation of pyroglutamate, formylation, gamma-carboxylation, glycosylation, GPI anchor formation, hydroxylation, iodination, methylation, myristoylation, oxidation, proteolytic processing, phosphorylation, prenylation, racemization, selenoylation, sulfation, transfer-RNA mediated addition of amino acids to proteins such as arginylation, and ubiquitination. Other modification include, e.g., labeling with radionuclides, and various enzymatic modifications, as will be readily appreciated by those skilled in the art. A variety of methods for labeling polypeptides and of substituents or labels useful for such purposes are well known in the art, and include radioactive isotopes such as ¹²⁵I, ³²P, ³⁵S, ¹⁴C and ³H, ligands which bind to labeled antiligands (e.g., antibodies), fluorophores, chemiluminescent agents, enzymes, and antiligands which can serve as specific binding pair members for a labeled ligand. The choice of label depends on the sensitivity required, ease of conjugation with the primer, stability requirements, and available instrumentation. Methods for labeling polypeptides are well known in the art. See Ausubel (1992), supra; Ausubel (1999), supra.

[0084] The term “fusion protein” refers to polypeptides of the present invention coupled to a heterologous amino acid sequences. Fusion proteins are useful because they can be constructed to contain two or more desired functional elements from two or more different proteins. A fusion protein comprises at least 10 contiguous amino acids from a polypeptide of interest, more preferably at least 20 or 30 amino acids, even more preferably at least 40, 50 or 60 amino acids, yet more preferably at least 75, 100 or 125 amino acids. Fusion proteins can be produced recombinantly by constructing a nucleic acid sequence that encodes the polypeptide or a fragment thereof in frame with a nucleic acid sequence encoding a different protein or peptide and then expressing the fusion protein. Alternatively, a fusion protein can be produced chemically by crosslinking the polypeptide or a fragment thereof to another protein.

[0085] The term “analog” refers to both polypeptide analogs and non-peptide analogs. The term “polypeptide analog” as used herein refers to a polypeptide that is comprised of a segment of at least 25 amino acids that has substantial identity to a portion of an amino acid sequence but which contains non-natural amino acids or non-natural inter-residue bonds. In a preferred embodiment, the analog has the same or similar biological activity as the native polypeptide. Typically, polypeptide analogs comprise a conservative amino acid substitution (or insertion or deletion) with respect to the naturally occurring sequence. Analogs typically are at least 20 amino acids long, preferably at least 50 amino acids long or longer, and can often be as long as a full-length naturally occurring polypeptide.

[0086] The term “non-peptide analog” refers to a compound with properties that are analogous to those of a reference polypeptide. A non-peptide compound may also be termed a “peptide mimetic” or a “peptidomimetic.” Such compounds are often developed with the aid of computerized molecular modeling. Peptide mimetics that are structurally similar to useful peptides may be used to produce an equivalent effect. Generally, peptidomimetics are structurally similar to a paradigm polypeptide (i.e., a polypeptide that has a desired-biochemical property or pharmacological activity), but have one or more peptide linkages optionally replaced by a linkage selected from the group consisting of: —CH₂NH—, —CH₂S—, —CH₂—CH₂—, —CH═CH—(cis and trans), —COCH₂—, —CH(OH)CH₂—, and —CH₂SO—, by methods well known in the art. Systematic substitution of one or more amino acids of a consensus sequence with a D-amino acid of the same type (e.g., D-lysine in place of L-lysine) may also be used to generate more stable peptides. In addition, constrained peptides comprising a consensus sequence or a substantially identical consensus sequence variation may be generated by methods known in the art (Rizo et al., Ann. Rev. Biochem. 61: 387-418 (1992)). For example, one may add internal cysteine residues capable of forming intramolecular disulfide bridges which cyclize the peptide.

[0087] The term “mutant” or “mutein” when referring to a polypeptide of the present invention relates to an amino acid sequence containing substitutions, insertions or deletions of one or more amino acids compared to the amino acid sequence of a ESP. A mutein may have one or more amino acid point substitutions, in which a single amino acid at a position has been changed to another amino acid, one or more insertions and/or deletions, in which one or more amino acids are inserted or deleted, respectively, in the sequence of the naturally occurring protein, and/or truncations of the amino acid sequence at either or both the amino or carboxy termini. Further, a mutein may have the same or different biological activity as the naturally occurring protein. For instance, a mutein may have an increased or decreased biological activity. A mutein has at least 50% sequence similarity to the wild type protein, preferred is 60% sequence similarity, more preferred is 70% sequence similarity. Even more preferred are muteins having 80%, 85% or 90% sequence similarity to a ESP. In an even more preferred embodiment, a mutein exhibits 95% sequence identity, even more preferably 97%, even more preferably 98% and even more preferably 99%. Sequence similarity may be measured by any common sequence analysis algorithm, such as GAP or BESTFIT or other variation Smith-Waterman alignment. See, T. F. Smith and M. S. Waterman, J. Mol. Biol. 147:195-197 (1981) and W. R. Pearson, Genomics 11:635-650 (1991).

[0088] Preferred amino acid substitutions are those which: (1) reduce susceptibility to proteolysis, (2) reduce susceptibility to oxidation, (3) alter binding affinity for forming protein complexes, (4) alter binding affinity or enzymatic activity, and (5) confer or modify other physicochemical or functional properties of such analogs. For example, single or multiple amino acid substitutions (preferably conservative amino acid substitutions) may be made in the naturally occurring sequence (preferably in the portion of the polypeptide outside the domain(s) forming intermolecular contacts. In a preferred embodiment, the amino acid substitutions are moderately conservative substitutions or conservative substitutions. In a more preferred embodiment, the amino acid substitutions are conservative substitutions. A conservative amino acid substitution should not substantially change the structural characteristics of the parent sequence (e.g., a replacement amino acid should not tend to disrupt a helix that occurs in the parent sequence, or disrupt other types of secondary structure that characterizes the parent sequence). Examples of art-recognized polypeptide secondary and tertiary structures are described in Creighton (ed.), Proteins, Structures and Molecular Principles, W. H. Freeman and Company (1984); Branden et al. (ed.), Introduction to Protein Structure, Garland Publishing (1991); Thornton et al., Nature 354:105-106 (1991).

[0089] As used herein, the twenty conventional amino acids and their abbreviations follow conventional usage. See Golub et al (eds.), Immunology—A Synthesis 2^{nd} Ed., Sinauer Associates (1991). Stereoisomers (e.g., D-amino acids) of the twenty conventional amino acids, unnatural amino acids such as α-, α-disubstituted amino acids, N-alkyl amino acids, and other unconventional amino acids may also be suitable components for polypeptides of the present invention. Examples of unconventional amino acids include: 4-hydroxyproline, γ-carboxyglutamate, ε-N,N,N-trimethyllysine, ε-N-acetyllysine, O-phosphoserine, N-acetylserine, N-formylmethionine, 3-methylhistidine, 5-hydroxylysine, s-N-methylarginine, and other similar amino acids and imino acids (e.g., 4-hydroxyproline). In the polypeptide notation used herein, the lefthand direction is the amino terminal direction and the right hand direction is the carboxy-terminal direction, in accordance with standard usage and convention.

[0090] By “homology” or “homologous” when referring to a polypeptide of the present invention it is meant polypeptides from different organisms with a similar sequence to the encoded amino acid sequence of a ESP and a similar biological activity or function. Although two polypeptides are said to be “homologous,” this does not imply that there is necessarily an evolutionary relationship between the polypeptides. Instead, the term “homologous” is defined to mean that the two polypeptides have similar amino acid sequences and similar biological activities or functions. In a preferred embodiment, a homologous polypeptide is one that exhibits 50% sequence similarity to ESP, preferred is 60% sequence similarity, more preferred is 70% sequence similarity. Even more preferred are homologous polypeptides that exhibit 80%, 85% or 90% sequence similarity to a ESP. In a yet more preferred embodiment, a homologous polypeptide exhibits 95%, 97%, 98% or 99% sequence similarity.

[0091] When “sequence similarity” is used in reference to polypeptides, it is recognized that residue positions that are not identical often differ by conservative amino acid substitutions. In a preferred embodiment, a polypeptide that has “sequence similarity” comprises conservative or moderately conservative amino acid substitutions. A “conservative amino acid substitution” is one in which an amino acid residue is substituted by another amino acid residue having a side chain (R group) with similar chemical properties (e.g., charge or hydrophobicity). In general, a conservative amino acid substitution will not substantially change the functional properties of a protein. In cases where two or more amino acid sequences differ from each other by conservative substitutions, the percent sequence identity or degree of similarity may be adjusted upwards to correct for the conservative nature of the substitution. Means for making this adjustment are well known to those of skill in the art. See, e.g., Pearson, Methods Mol. Biol. 24: 307-31 (1994).

[0092] For instance, the following six groups each contain amino acids that are conservative substitutions for one another:
[0093] 1) Serine (S), Threonine (T);
[0094] 2) Aspartic Acid (D), Glutamic Acid (E);
[0095] 3) Asparagine (N), Glutamine (Q);
[0096] 4) Arginine (R), Lysine (K);
[0097] 5) Isoleucine (1), Leucine (L), Methionine (M), Alanine (A), Valine (V), and
[0098] 6) Phenylalanine (F), Tyrosine (Y), Tryptophan (W).

[0099] Alternatively, a conservative replacement is any change having a positive value in the PAM250 log-likelihood matrix disclosed in Gonnet et al., Science 256: 1443-45 (1992). A “moderately conservative” replacement is any change having a nonnegative value in the PAM250 log-likelihood matrix.

[0100] Sequence similarity for polypeptides, which is also referred to as sequence identity, is typically measured using sequence analysis software. Protein analysis software matches similar sequences using measures of similarity assigned to various substitutions, deletions and other modifications, including conservative amino acid substitutions. For instance, GCG contains programs such as “Gap” and “Bestfit” which can be used with default parameters to determine sequence homology or sequence identity between closely related polypeptides, such as homologous polypeptides from different species of organisms or between a wild type protein and a mutein thereof. See, e.g., GCG Version 6.1. Other programs include FASTA, discussed supra.

[0101] A preferred algorithm when comparing a sequence of the invention to a database containing a large number of sequences from different organisms is the computer program BLAST, especially blastp or tblastn. See, e.g., Altschul et al., J. Mol. Biol. 215: 403-410 (1990); Altschul et al., Nucleic Acids Res. 25:3389-402 (1997). Preferred parameters for blastp are:
[0102] Expectation value: 10 (default)
[0103] Filter: seg (default)
[0104] Cost to open a gap: 11 (default)
[0105] Cost to extend a gap: 1 (default
[0106] Max. alignments: 100 (default)
[0107] Word size: 11 (default)
[0108] No. of descriptions: 100 (default)
[0109] Penalty Matrix: BLOSUM62

[0110] The length of polypeptide sequences compared for homology will generally be at least about 16 amino acid residues, usually at least about 20 residues, more usually at least about 24 residues, typically at least about 28 residues, and preferably more than about 35 residues. When searching a database containing sequences from a large number of different organisms, it is preferable to compare amino acid sequences.

[0111] Algorithms other than blastp for database searching using amino acid sequences are known in the art. For instance, polypeptide sequences can be compared using FASTA, a program in GCG Version 6.1. FASTA (e.g. FASTA2 and FASTA3) provides alignments and percent sequence identity of the regions of the best overlap between the query and search sequences (Pearson (1990), supra; Pearson (2000), supra. For example, percent sequence identity between amino acid sequences can be determined using FASTA with its default or recommended parameters (a word size of 2 and the PAM250 scoring matrix), as provided in GCG Version 6.1.

[0112] An “antibody” refers to an intact immunoglobulin, or to an antigen-binding portion thereof that competes with the intact antibody for specific binding to a molecular species, e.g., a polypeptide of the instant invention. Antigen-binding portions may be produced by recombinant DNA techniques or by enzymatic or chemical cleavage of intact antibodies. Antigen-binding portions include, inter alia, Fab, Fab′, F(ab′)₂, Fv, dAb, and complementarity determining region (CDR) fragments, single-chain antibodies (scFv), chimeric antibodies, diabodies and polypeptides that contain at least a portion of ail immunoglobulin that is sufficient to confer specific antigen binding to the polypeptide. A Fab fragment is a monovalent fragment consisting of the VL, VH, CL and CH1 domains; a F(ab′)₂ fragment is a bivalent fragment comprising two Fab fragments linked by a disulfide bridge at the hinge region; a Fd fragment consists of the VH and CH1 domains; a Fv fragment consists of the VL and VH domains of a single arm of an antibody; and a dAb fragment consists of a VH domain. See, e.g., Ward et al., Nature 341: 544-546 (1989).

[0113] By “bind specifically” and “specific binding” as used herein it is meant the ability of the antibody to bind to a first molecular species in preference to binding to other molecular species with which the antibody and first molecular species are admixed. An antibody is said specifically to “recognize” a first molecular species when it can bind specifically to that first molecular species.

[0114] A single-chain antibody (scFv) is an antibody in which VL and VH regions are paired to form a monovalent molecule via a synthetic linker that enables them to be made as a single protein chain. See, e.g., Bird et al., Science 242: 423426 (1988); Huston et al., Proc. Natl. Acad. Sci. USA 85: 5879-5883 (1988). Diabodies are bivalent, bispecific antibodies in which VH and VL domains are expressed on a single polypeptide chain, but using a linker that is too short to allow for pairing between the two domains on the same chain, thereby forcing the domains to pair with complementary domains of another chain and creating two antigen binding sites. See e.g., Holliger et al., Proc. Natl. Acad. Sci. USA 90: 6444-6448 (1993); Poljak et al., Structure 2: 1121-1123 (1994). One or more CDRs may be incorporated into a molecule either covalently or noncovalently to make it an immunoadhesin. An immunoadhesin may incorporate the CDR(s) as part of a larger polypeptide chain, may covalently link the CDR(s) to another polypeptide chain, or may incorporate the CDR(s) noncovalently. The CDRs permit the immunoadhesin to specifically bind to a particular antigen of interest. A chimeric antibody is an antibody that contains one or more regions from one antibody and one or more regions from one or more other antibodies.

[0115] An antibody may have one or more binding sites. If there is more than one binding site, the binding sites may be identical to one another or may be different. For instance, a naturally occurring immunoglobulin has two identical binding sites, a single-chain antibody or Fab fragment has one binding site, while a “bispecific” or “bifunctional” antibody has two different binding sites.

[0116] An “isolated antibody” is an antibody that (I) is not associated with naturally-associated components, including other naturally-associated antibodies, that accompany it in its native state, (2) is free of other proteins from the same species, (3) is expressed by a cell from a different species, or (4) does not occur in nature. It is known that purified proteins, including purified antibodies, may be stabilized with non-naturally-associated components. The non-naturally-associated component may be a protein, such as albumin (e.g., BSA) or a chemical such as polyethylene glycol (PEG).

[0117] A “neutralizing antibody” or “an inhibitory antibody” is an antibody that inhibits the activity of a polypeptide or blocks the binding of a polypeptide to a ligand that normally binds to it. An “activating antibody” is an antibody that increases the activity of a polypeptide.

[0118] The term “epitope” includes any protein determinant capable of specific binding to an immunoglobulin or T-cell receptor. Epitopic determinants usually consist of chemically active surface groupings of molecules such as amino acids or sugar side chains and usually have specific three-dimensional structural characteristics, as well as specific charge characteristics. An antibody is said to specifically bind an antigen when the dissociation constant is less than 1 μM, preferably less than 100 nM and most preferably less than 10 nM.

[0119] The term “patient” includes human and veterinary subjects.

[0120] Throughout this specification and claims, the word “comprise,” or variations such as “comprises” or “comprising,” will be understood to imply the inclusion of a stated integer or group of integers but not the exclusion of any other integer or group of integers.

[0121] The term “endometrial specific” refers to a nucleic acid molecule or polypeptide that is expressed predominantly in the endometrial as compared to other tissues in the body. In a preferred embodiment, a “endometrial specific” nucleic acid molecule or polypeptide is detected at a level that is 1.5-fold higher than any other tissue in the body. In a more preferred embodiment, the “endometrial specific” nucleic acid molecule or polypeptide is detected at a level that is 2-fold higher than any other tissue in the body, more preferably 5-fold higher, still more preferably at least 10-fold, 15-fold, 20-fold, 25-fold, 50-fold or 100-fold higher than any other tissue in the body. Nucleic acid molecule levels may be measured by nucleic acid hybridization, such as Northern blot hybridization, or quantitative PCR. Polypeptide levels may be measured by any method known to accurately quantitate protein levels, such as Western blot analysis.

Nucleic Acid Molecules, Regulatory Sequences, Vectors, Host Cells and Recombinant Methods of Making Polypeptides

[0122] Nucleic Acid Molecules

[0123] One aspect of the invention provides isolated nucleic acid molecules that are specific to the endometrial or to endometrial cells or tissue or that are derived from such nucleic acid molecules. These isolated endometrial specific nucleic acids (ESNAs) may comprise cDNA genomic DNA, RNA, or a combination thereof, a fragment of one of these nucleic acids, or may be a non-naturally occurring nucleic acid molecule. A ESNA may be derived from an animal. In a preferred embodiment, the ESNA is derived from a human or other mammal. In a more preferred embodiment, the ESNA is derived from a human or other primate. In an even more preferred embodiment, the ESNA is derived from a human.

[0124] In a preferred embodiment, the nucleic acid molecule encodes a polypeptide that is specific to endometrial, a endometrial-specific polypeptide (ESP). In a more preferred embodiment, the nucleic acid molecule encodes a polypeptide that comprises an amino acid sequence of SEQ ID NO: 420-600. In another highly preferred embodiment, the nucleic acid molecule comprises a nucleic acid sequence of SEQ ID NO: 1-419. Nucleotide sequences of the instantly-described nucleic acid molecules were determined by assembling several DNA molecules from either public or proprietary databases. Some of the underlying DNA sequences are the result, directly or indirectly, of at least one enzymatic polymerization reaction (e.g., reverse transcription and/or polymerase chain reaction) using an automated sequencer (such as the MegaBACE™ 1000, Amersham Biosciences, Sunnyvale, Calif., USA).

[0125] Nucleic acid molecules of the present invention may also comprise sequences that selectively hybridizes to a nucleic acid molecule encoding a ESNA or a complement or antisense thereof. The hybridizing nucleic acid molecule may or may not encode a polypeptide or may or may not encode a ESP. However, in a preferred embodiment, the hybridizing nucleic acid molecule encodes a ESP. In a more preferred embodiment, the invention provides a nucleic acid molecule that selectively hybridizes to a nucleic acid molecule or the antisense sequence of a nucleic acid molecule that encodes a polypeptide comprising an amino acid sequence of SEQ ID NO: 420-600. In an even more preferred embodiment, the invention provides a nucleic acid molecule that selectively hybridizes to a nucleic acid molecule comprising the nucleic acid sequence of SEQ ID NO: 1-419 or the antisense sequence thereof. Preferably, the nucleic acid molecule selectively hybridizes to a nucleic acid molecule or the antisense sequence of a nucleic acid molecule encoding a ESP under low stringency conditions. More preferably, the nucleic acid molecule selectively hybridizes to a nucleic acid molecule or the antisense sequence of a nucleic acid molecule encoding a ESP under moderate stringency conditions. Most preferably, the nucleic acid molecule selectively hybridizes to a nucleic acid molecule or the antisense sequence of a nucleic acid molecule encoding a ESP under high stringency conditions. In a preferred embodiment, the nucleic acid molecule hybridizes under low, moderate or high stringency conditions to a nucleic acid molecule or the antisense sequence of a nucleic acid molecule encoding a polypeptide comprising an amino acid sequence of SEQ ID NO: 420-600. In a more preferred embodiment, the nucleic acid molecule hybridizes under low, moderate or high stringency conditions to a nucleic acid molecule or the antisense sequence of a nucleic acid molecule comprising a nucleic acid sequence selected from SEQ ID NO: 1-419.

[0126] Nucleic acid molecules of the present invention may also comprise nucleic acid sequences that exhibit substantial sequence similarity to a nucleic acid encoding a ESP or a complement of the encoding nucleic acid molecule. In this embodiment, it is preferred that the nucleic acid molecule exhibit substantial sequence similarity to a nucleic acid molecule encoding human ESP. More preferred is a nucleic acid molecule exhibiting substantial sequence similarity to a nucleic acid molecule encoding a polypeptide having an amino acid sequence of SEQ ID NO: 420-600. By substantial sequence similarity it is meant a nucleic acid molecule having at least 60% sequence identity with a nucleic acid molecule encoding a ESP, such as a polypeptide having an amino acid sequence of SEQ ID NO: 420-600, more preferably at least 70%, even more preferably at least 80% and even more preferably at least 85%. In a more preferred embodiment, the similar nucleic acid molecule is one that has at least 90% sequence identity with a nucleic acid molecule encoding a ESP, more preferably at least 95%, more preferably at least 97%, even more preferably at least 98%, and still more preferably at least 99%. Most preferred in this embodiment is a nucleic acid molecule that has at least 99.5%, 99.6%, 99.7%, 99.8% or 99.9% sequence identity with a nucleic acid molecule encoding a ESP.

[0127] The nucleic acid molecules of the present invention are also inclusive of those exhibiting substantial sequence similarity to a ESNA or its complement. In this embodiment, it is preferred that the nucleic acid molecule exhibit substantial sequence similarity to a nucleic acid molecule having a nucleic acid sequence of SEQ ID NO: 1-419. By substantial sequence similarity it is meant a nucleic acid molecule that has at least 60% sequence identity with a ESNA, such as one having a nucleic acid sequence of SEQ ID NO: 1-419, more preferably at least 70%, even more preferably at least 80% and even more preferably at least 85%. More preferred is a nucleic acid molecule that has at least 90% sequence identity with a ESNA, more preferably at least 95%, more preferably at least 97%, even more preferably at least 98%, and still more preferably at least 99%. Most preferred is a nucleic acid molecule that has at least 99.5%, 99.6%, 99.7%, 99.8% or 99.9% sequence identity with a ESNA.

[0128] Nucleic acid molecules that exhibit substantial sequence similarity are inclusive of sequences that exhibit sequence identity over their entire length to a ESNA or to a nucleic acid molecule encoding a ESP, as well as sequences that are similar over only a part of its length. In this case, the part is at least 50 nucleotides of the ESNA or the nucleic acid molecule encoding a ESP, preferably at least 100 nucleotides, more preferably at least 150 or 200 nucleotides, even more preferably at least 250 or 300 nucleotides, still more preferably at least 400 or 500 nucleotides.

[0129] The substantially similar nucleic acid molecule may be a naturally occurring one that is derived from another species, especially one derived from another primate, wherein the similar nucleic acid molecule encodes an amino acid sequence that exhibits significant sequence identity to that of SEQ ID NO: 420-600 or demonstrates significant sequence identity to the nucleotide sequence of SEQ ID NO: 1-419. The similar nucleic acid molecule may also be a naturally occurring nucleic acid molecule from a human, when the ESNA is a member of a gene family. The similar nucleic acid molecule may also be a naturally occurring nucleic acid molecule derived from a non-primate, mammalian species, including without limitation, domesticated species, e.g., dog, cat, mouse, rat, rabbit, hamster, cow, horse and pig; and wild animals, e.g., monkey, fox, lions, tigers, bears, giraffes, zebras, etc. The substantially similar nucleic acid molecule may also be a naturally occurring nucleic acid molecule derived from a non-mammalian species, such as birds or reptiles. The naturally occurring substantially similar nucleic acid molecule may be isolated directly from humans or other species. In another embodiment, the substantially similar nucleic acid molecule may be one that is experimentally produced by random mutation of a nucleic acid molecule. In another embodiment, the substantially similar nucleic acid molecule may be one that is experimentally produced by directed mutation of a ESNA. In a preferred embodiment, the substantially similar nucleic acid molecule is an ESNA.

[0130] The nucleic acid molecules of the present invention are also inclusive of allelic variants of a ESNA or a nucleic acid encoding a ESP. For example, single nucleotide polymorphisms (SNPs) occur frequently in eukaryotic genomes and the sequence determined from one individual of a species may differ from other allelic forms present within the population. More than 1.4 million SNPs have already identified in the human genome, International Human Genome Sequencing Consortium, Nature 409: 860-921 (2001)—Variants with small deletions and insertions of more than a single nucleotide are also found in the general population, and often do not alter the function of the protein. In addition, amino acid substitutions occur frequently among natural allelic variants, and often do not substantially change protein function.

[0131] In a preferred embodiment, the allelic variant is a variant of a gene, wherein the gene is transcribed into an mRNA that encodes a ESP. In a more preferred embodiment, the gene is transcribed into an mRNA that encodes a ESP comprising an amino acid sequence of SEQ ID NO: 420-600. In another preferred embodiment, the allelic variant is a variant of a gene, wherein the gene is transcribed into an mRNA that is a ESNA. In a more preferred embodiment, the gene is transcribed into an mRNA that comprises the nucleic acid sequence of SEQ ID NO: 1-419. Also preferred is that the allelic variant is a naturally occurring allelic variant in the species of interest, particularly human.

[0132] Nucleic acid molecules of the present invention are also inclusive of nucleic acid sequences comprising a part of a nucleic acid sequence of the instant invention. The part may or may not encode a polypeptide, and may or may not encode a polypeptide that is a ESP. In a preferred embodiment, the part encodes a ESP. In one embodiment, the nucleic acid molecule comprises a part of a ESNA. In another embodiment, the nucleic acid molecule comprises a part of a nucleic acid molecule that hybridizes or exhibits substantial sequence similarity to a ESNA. In another embodiment, the nucleic acid molecule comprises a part of a nucleic acid molecule that is an allelic variant of a ESNA. In yet another embodiment, the nucleic acid molecule comprises a part of a nucleic acid molecule that encodes a ESP. A part comprises at least 10 nucleotides, more preferably at least 15, 17, 18, 20, 25, 30, 35, 40, 50, 60, 70, 80, 90, 100, 150, 200, 250, 300, 350, 400 or 500 nucleotides. The maximum size of a nucleic acid part is one nucleotide shorter than the sequence of the nucleic acid molecule encoding the full-length protein.

[0133] Nucleic acid molecules of the present invention are also inclusive of nucleic acid sequences that encode fusion proteins, homologous proteins, polypeptide fragments, muteins and polypeptide analogs, as described infra.

[0134] Nucleic acid molecules of the present invention are also inclusive of nucleic acid sequences containing modifications of the native nucleic acid molecule. Examples of such modifications include, but are not limited to, normative internucleoside bonds, post-synthetic modifications or altered nucleotide analogues. One having ordinary skill in the art would recognize that the type of modification that may be made will depend upon the intended use of the nucleic acid molecule. For instance, when the nucleic acid molecule is used as a hybridization probe, the range of such modifications will be limited to those that permit sequence-discriminating base pairing of the resulting nucleic acid. When used to direct expression of RNA or protein in vitro or in vivo, the range of such modifications will be limited to those that permit the nucleic acid to function properly as a polymerization substrate. When the isolated nucleic acid is used as a therapeutic agent, the modifications will be limited to those that do not confer toxicity upon the isolated nucleic acid.

[0135] Accordingly, in one embodiment, a nucleic acid molecule may include nucleotide analogues that incorporate labels that are directly detectable, such as radiolabels or fluorophores, or nucleotide analogues that incorporate labels that can be visualized in a subsequent reaction, such as biotin or various haptens. The labeled nucleic acid molecules are particularly useful as hybridization probes.

[0136] Common radiolabeled analogues include those labeled with ³³P, ³²P, and ³⁵S, such as α-³²P-dATP, α-³²P-dCTP, α-³²P-dGTP, α-³²P-dTTP, α-³²P-3′dATP, α-³²P-ATP, α-³²P-CTP, α-³²P-GTP, α-³²P-UTP, α-³⁵S-dATP, γ-³⁵S-GTP, γ-³³P-dATP, and the like.

[0137] Commercially available fluorescent nucleotide analogues readily incorporated into the nucleic acids of the present invention include Cy3-dCTP, Cy3-dUTP, Cy5-dCTP, Cy3-dUTP (Amersham Biosciences, Piscataway, N.J., USA), fluorescein-12-dUTP, tetramethylrhodamine-6-dUTP, Texas Red®-5-dUTP, Cascade Blue®-7-dUTP, BODIPY® FL-14-dUTP, BODIPY® TMR-14-dUTP, BODIPY® TR-14-dUTP, Rhodamine Green™-5-dUTP, Oregon Green® 488-5-dUTP, Texas Red®-12-dUTP, BODIPY® 630/650-14-dUTP, BODIPY®D 650/665-14-dUTP, Alexa Fluor® 488-5-dUTP, Alexa Fluor® 532-5-dUTP, Alexa Fluor® 568-5-dUTP, Alexa Fluor® 594-5-dUTP, Alexa Fluor® 546-14-dUTP, fluorescein-12-UTP, tetramethylrhodamine-6-UTP, Texas Red®-5-UTP, Cascade Blue®-7-UTP, BODIPY®V FL-14-UTP, BODIPY® TMR-14-UTP, BODIPY® TR-14-UTP, Rhodamine Green™-5-UTP, Alexa Fluor® 488-5-UTP, Alexa Fluor® 546-14-UTP (Molecular Probes, Inc. Eugene, Oreg., USA). One may also custom synthesize nucleotides having other fluorophores. See Henegariu et al., Nature Biotechnol. 18: 345-348 (2000).

[0138] Haptens that are commonly conjugated to nucleotides for subsequent labeling include biotin (biotin-11-dUTP, Molecular Probes, Inc., Eugene, Oreg., USA; biotin-21-UTP, biotin-21-dUTP, Clontech Laboratories, Inc., Palo Alto, Calif., USA), digoxigenin (DIG-11-dUTP, alkali labile, DIG-11-UTP, Roche Diagnostics Corp., Indianapolis, Ind., USA), and dinitrophenyl (dinitrophenyl-11-dUTP, Molecular Probes, Inc., Eugene, Oreg., USA).

[0139] Nucleic acid molecules of the present invention can be labeled by incorporation of labeled nucleotide analogues into the nucleic acid. Such analogues can be incorporated by enzymatic polymerization, such as by nick translation, random priming, polymerase chain reaction (PCR), terminal transferase tailing, and end-filling of overhangs, for DNA molecules, and in vitro transcription driven, e.g., from phage promoters, such as T7, T3, and SP6, for RNA molecules. Commercial kits are readily available for each such labeling approach. Analogues can also be incorporated during automated solid phase chemical synthesis. Labels can also be incorporated after nucleic acid synthesis, with the 5′ phosphate and 3′ hydroxyl providing convenient sites for post-synthetic covalent attachment of detectable labels.

[0140] Other post-synthetic approaches also permit internal labeling of nucleic acids. For example, fluorophores can be attached using a cisplatin reagent that reacts with the N7 of guanine residues (and, to a lesser extent, adenine bases) in DNA, RNA, and Peptide Nucleic Acids (PNA) to provide a stable coordination complex between the nucleic acid and fluorophore label (Universal Linkage System) (available from Molecular Probes, Inc., Eugene, Oreg., USA and Amersham Pharmacia Biotech, Piscataway, N.J., USA); see Alers et al., Genes, Chromosomes & Cancer 25: 301-305 (1999); Jelsma et al., J. NIH Res. 5: 82 (1994); Van Belkum et al., BioTechniques 16: 148-153 (1994). Alternatively, nucleic acids can be labeled using a disulfide-containing linker (FastTag™ Reagent, Vector Laboratories, Inc., Burlingame, Calif., USA) that is photo- or thermally coupled to the target nucleic acid using aryl azide chemistry; after reduction, a free thiol is available for coupling to a hapten, fluorophore, sugar, affinity ligand, or other marker.

[0141] One or more independent or interacting labels can be incorporated into the nucleic acid molecules of the present invention. For example, both a fluorophore and a moiety that in proximity thereto acts to quench fluorescence can be included to report specific hybridization through release of fluorescence quenching or to report exonucleotidic excision. See, e.g., Tyagi et al., Nature Biotechnol. 14: 303-308 (1996); Tyagi et al., Nature Biotechnol. 16: 49-53 (1998); Sokol et al., Proc. Natl. Acad. Sci. USA 95: 11538-11543 (1998); Kostrikis et al., Science 279: 1228-1229 (1998); Marras et al., Genet. Anal. 14: 151-156 (1999); Holland et al., Proc. Natl. Acad. Sci. USA 88: 7276-7280 (1991); Heid et al., Genome Res. 6(10): 986-94 (1996); Kuimelis et al., Nucleic Acids Symp. Ser. (37): 255-6 (1997); and U.S. Pat. Nos. 5,846,726, 5,925,517, 5,925,517, 5,723,591 and 5,538,848, the disclosures of which are incorporated herein by reference in their entireties.

[0142] Nucleic acid molecules of the present invention may also be modified by altering one or more native phosphodiester internucleoside bonds to more nuclease-resistant, internucleoside bonds. See Hartmann et al. (eds.), Manual of Antisense Methodology: Perspectives in Antisense Science, Kluwer Law International (1999); Stein et al. (eds.), Applied Antisense Oligonucleotide Technology, Wiley-Liss (1998); Chadwick et al. (eds.), Oligonucleotides as Therapeutic Agents—Symposium No. 209, John Wiley & Son Ltd (1997). Such altered internucleoside bonds are often desired for techniques or for targeted gene correction, Gamper et al., Nucl. Acids Res. 28(21): 43324339 (2000). For double stranded RNA inhibition which may utilize either natural ds RNA or ds RNA modified in its, sugar, phosphate or base, see Hannon, Nature 418(11): 244-251 (2002); Fire et al. in WO 99/32619; Tuschl et al. in U.S. 2002/0086356; Kruetzer et al. in WO 00/44895, the disclosures of which are incorporated herein by reference in their entirety;. For circular antisense, see Kool in U.S. Pat. No. 5,426,180, the disclosure of which is incorporated herein by reference in its entirety.

[0143] Modified oligonucleotide backbones include, without limitation, phosphorothioates, chiral phosphorothioates, phosphorodithioates, phosphotriesters, aminoalkylphosphotriesters, methyl and other alkyl phosphonates including 3′-alkylene phosphonates and chiral phosphonates, phosphinates, phosphoramidates including 3′-amino phosphoramidate and aminoalkylphosphoramidates, thionophosphoramidates, thionoalkylphosphonates, thionoalkylphosphotriesters, and boranophosphates having normal 3′-5′ linkages, 2′-5′ linked analogs of these, and those having inverted polarity wherein the adjacent pairs of nucleoside units are linked 3′-5′ to 5′-3′ or 2′-5′ to 5′-2′. Representative U.S. Patents that teach the preparation of the above phosphorus-containing linkages include, but are not limited to, U.S. Pat. Nos. 3,687,808; 4,469,863; 4,476,301; 5,023,243; 5,177,196; 5,188,897; 5,264,423; 5,276,019; 5,278,302; 5,286,717; 5,321,131; 5,399,676; 5,405,939; 5,453,496; 5,455,233; 5,466,677; 5,476,925; 5,519,126; 5,536,821; 5,541,306; 5,550,111; 5,563,253; 5,571,799; 5,587,361; and 5,625,050, the disclosures of which are incorporated herein by reference in their entireties. In a preferred embodiment, the modified internucleoside linkages may be used for antisense techniques.

[0144] Other modified oligonucleotide backbones do not include a phosphorus atom, but have backbones that are formed by short chain alkyl or cycloalkyl internucleoside linkages, mixed heteroatom and alkyl or cycloalkyl internucleoside linkages, or one or more short chain heteroatomic or heterocyclic internucleoside linkages. These include those having morpholino linkages (formed in part from the sugar portion of a nucleoside); siloxane backbones; sulfide, sulfoxide and sulfone backbones; formacetyl and thioformacetyl backbones; methylene formacetyl and thioformacetyl backbones; alkene containing backbones; sulfamate backbones; methyleneimino and methylenehydrazino backbones; sulfonate and sulfonamide backbones; amide backbones; and others having mixed N, O, S and CH₂ component parts. Representative U.S. patents that teach the preparation of the above backbones include, but are not limited to, U.S. Pat. Nos. 5,034,506; 5,166,315; 5,185,444; 5,214,134; 5,216,141; 5,235,033; 5,264,562; 5,264,564; 5,405,938; 5,434,257; 5,466,677; 5,470,967; 5,489,677; 5,541,307; 5,561,225; 5,596,086; 5,602,240; 5,610,289; 5,602,240; 5,608,046; 5,610,289; 5,618,704; 5,623,070; 5,663,312; 5,633,360; 5,677,437 and 5,677,439; the disclosures of which are incorporated herein by reference in their entireties.

[0145] In other preferred nucleic acid molecules, both the sugar and the internucleoside linkage are replaced with novel groups, such as peptide nucleic acids (PNA). In PNA compounds, the phosphodiester backbone of the nucleic acid is replaced with an amide-containing backbone, in particular by repeating N-(2-aminoethyl) glycine units linked by amide bonds. Nucleobases are bound directly or indirectly to aza nitrogen atoms of the amide portion of the backbone, typically by methylene carbonyl linkages. PNA can be synthesized using a modified peptide synthesis protocol. PNA oligomers can be synthesized by both Fmoc and tBoc methods. Representative U.S. patents that teach the preparation of PNA compounds include, but are not limited to, U.S. Pat. Nos. 5,539,082; 5,714,331; and 5,719,262, each of which is herein incorporated by reference in its entirety. Automated PNA synthesis is readily achievable on commercial synthesizers (see, e.g., “PNA User's Guide,” Rev. 2, February 1998, Perseptive Biosystems Part No. 60138, Applied Biosystems, Inc., Foster City, Calif.). PNA molecules are advantageous for a number of reasons. First, because the PNA backbone is uncharged, PNA/DNA and PNA/RNA duplexes have a higher thermal stability than is found in DNA/DNA and DNA/RNA duplexes. The Tm of a PNA/DNA or PNA/RNA duplex is generally 1° C. higher per base pair than the Tm of the corresponding DNA/DNA or DNA/RNA duplex (in 100 mM NaCl). Second, PNA molecules can also form stable PNA/DNA complexes at low ionic strength, under conditions in which DNA/DNA duplex formation does not occur. Third, PNA also demonstrates greater specificity in binding to complementary DNA because a PNA/DNA mismatch is more destabilizing than DNA/DNA mismatch. A single mismatch in mixed a PNA/DNA 15-mer lowers the Tm by 8-20° C. (15° C. on average). In the corresponding DNA/DNA duplexes, a single mismatch lowers the Tm by 4-16° C. (1° C. on average). Because PNA probes can be significantly shorter than DNA probes, their specificity is greater. Fourth, PNA oligomers are resistant to degradation by enzymes, and the lifetime of these compounds is extended both in vivo and in vitro because nucleases and proteases do not recognize the PNA polyamide backbone with nucleobase sidechains. See, e.g., Ray et al., FASEB J. 14(9): 1041-60 (2000); Nielsen et al., Pharmacol Toxicol. 86(1): 3-7 (2000); Larsen et al., Biochim Biophys Acta. 1489(1): 159-66 (1999); Nielsen, Curr. Opin. Struct. Biol. 9(3): 353-7 (1999), and Nielsen, Curr. Opin. Biotechnol. 10(1): 71-5 (1999).

[0146] Nucleic acid molecules may be modified compared to their native structure throughout the length of the nucleic acid molecule or can be localized to discrete portions thereof. As an example of the latter, chimeric nucleic acids can be synthesized that have discrete DNA and RNA domains and that can be used for targeted gene repair and modified PCR reactions, as further described in, Misra et al., Biochem. 37: 1917-1925 (1998); and Finn et al., Nucl. Acids Res. 24: 3357-3363 (1996), and U.S. Pat. Nos. 5,760,012 and 5,731,181, the disclosures of which are incorporated herein by reference in their entireties.

[0147] Unless otherwise specified, nucleic acid molecules of the present invention can include any topological conformation appropriate to the desired use; the term thus explicitly comprehends, among others, single-stranded, double-stranded, triplexed, quadruplexed, partially double-stranded, partially-triplexed, partially-quadruplexed, branched, hairpinned, circular, and padlocked conformations. Padlock conformations and their utilities are further described in Banèr et al., Curr. Opin. Biotechnol. 12: 11-15 (2001); Escude et al., Proc. Natl. Acad. Sci. USA 14: 96(19): 10603-7 (1999); and Nilsson et al., Science 265(5181): 2085-8 (1994). Triplex and quadruplex conformations, and their utilities, are reviewed in Praseuth et al, Biochim. Biophys. Acta. 1489(1): 181-206 (1999); Fox, Curr. Med. Chem. 7(1): 17-37 (2000); Kochetkova et al., Methods Mol. Biol. 130: 189-201 (2000); Chan et al., J. Mol. Med. 75(4): 267-82 (1997); Rowley et al., Mol Med 5(10): 693-700 (1999); Kool, Annu Rev Biophys Biomol Struct. 25: 1-28 (1996).

[0148] Methods for Using Nucleic Acid Molecules as Probes and Primers

[0149] The isolated nucleic acid molecules of the present invention can be used as hybridization probes to detect, characterize, and quantify hybridizing nucleic acids in, and isolate hybridizing nucleic acids from, both genomic and transcript-derived nucleic acid samples. When free in solution, such probes are typically, but not invariably, detectably labeled; bound to a substrate, as in a microarray, such probes are typically, but not invariably unlabeled.

[0150] In one embodiment, the isolated nucleic acid molecules of the present invention can be used as probes to detect and characterize gross alterations in the gene of a ESNA, such as deletions, insertions, translocations, and duplications of the ESNA genomic locus through fluorescence in situ hybridization (FISH) to chromosome spreads. See, e.g., Andreeff et al. (eds.), Introduction to Fluorescence In Situ Hybridization: Principles and Clinical Applications, John Wiley & Sons (1999). The isolated nucleic acid molecules of the present invention can be used as probes to assess smaller genomic alterations using, e.g., Southern blot detection of restriction fragment length polymorphisms. The isolated nucleic acid molecules of the present invention can be used as probes to isolate genomic clones that include a nucleic acid molecule of the present invention, which thereafter can be restriction mapped and sequenced to identify deletions, insertions, translocations, and substitutions (single nucleotide polymorphisms, SNPs) at the sequence level. Alternatively, detection techniques such as molecular beacons may be used, see Kostrikis et al. Science 279:1228-1229 (1998).

[0151] The isolated nucleic acid molecules of the present invention can be also be used as probes to detect, characterize, and quantify ESNA in, and isolate ESNA from, transcript-derived nucleic acid samples. In one embodiment, the isolated nucleic acid molecules of the present invention can be used as hybridization probes to detect, characterize by length, and quantify mRNA by Northern blot of total or poly-A⁺-selected RNA samples. In another embodiment, the isolated nucleic acid molecules of the present invention can be used as hybridization probes to detect, characterize by location, and quantify mRNA by in situ hybridization to tissue sections. See, e.g., Schwarchzacher et al., In Situ Hybridization, Springer-Verlag New York (2000). In another preferred embodiment, the isolated nucleic acid molecules of the present invention can be used as hybridization probes to measure the representation of clones in a cDNA library or to isolate hybridizing nucleic acid molecules acids from cDNA libraries, permitting sequence level characterization of mRNAs that hybridize to ESNAs, including, without limitations, identification of deletions, insertions, substitutions, truncations, alternatively spliced forms and single nucleotide polymorphisms. In yet another preferred embodiment, the nucleic acid molecules of the instant invention may be used in microarrays.

[0152] All of the aforementioned probe techniques are well within the skill in the art, and are described at greater length in standard texts such as Sambrook (2001), supra; Ausubel (1999), supra; and Walker et al (eds.), The Nucleic Acids Protocols Handbook, Humana Press (2000).

[0153] In another embodiment, a nucleic acid molecule of the invention may be used as a probe or primer to identify and/or amplify a second nucleic acid molecule that selectively hybridizes to the nucleic acid molecule of the invention. In this embodiment, it is preferred that the probe or primer be derived from a nucleic acid molecule encoding a ESP. More preferably, the probe or primer is derived from a nucleic acid molecule encoding a polypeptide having an amino acid sequence of SEQ ID NO: 420-600. Also preferred are probes or primers derived from a ESNA. More preferred are probes or primers derived from a nucleic acid molecule having a nucleotide sequence of SEQ ID NO: 1-419.

[0154] In general, a probe or primer is at least 10 nucleotides in length, more preferably at least 12, more preferably at least 14 and even more preferably at least 16 or 17 nucleotides in length. In an even more preferred embodiment, the probe or primer is at least 18 nucleotides in length, even more preferably at least 20 nucleotides and even more preferably at least 22 nucleotides in length. Primers and probes may also be longer in length. For instance, a probe or primer may be 25 nucleotides in length, or may be 30, 40 or 50 nucleotides in length. Methods of performing nucleic acid hybridization using oligonucleotide probes are well known in the art See, e.g., Sambrook et al, 1989, supra, Chapter 11 and pp. 11.31-11.32 and 11.40-11.44, which describes radiolabeling of short probes, and pp. 11.45-11.53, which describe hybridization conditions for oligonucleotide probes, including specific conditions for probe hybridization (pp. 11.50-11.51).

[0155] Methods of performing primer-directed amplification are also well known in the art. Methods for performing the polymerase chain reaction (PCR) are compiled, inter alia, in McPherson, PCR Basics: From Background to Bench, Springer Verlag (2000); Innis et al. (eds.), PCR Applications: Protocols for Functional Genomics, Academic Press (1999); Gelfand et al (eds.), PCR Strategies, Academic Press (1998); Newton et at., PCR, Springer-Verlag New York (1997); Burke (ed.), PCR: Essential Techniques, John Wiley & Son Ltd (1996); White (ed.), PCR Cloning Protocols: From Molecular Cloning to Genetic Engineering, Vol. 67, Humana Press (1996); and McPherson et al. (eds.), PCR 2: A Practical Approach, Oxford University Press, Inc. (1995). Methods for performing RT-PCR are collected, e.g., in Siebert et al. (eds.), Gene Cloning and Analysis by RT-PCR, Eaton Publishing Company/Bio Techniques Books Division, 1998; and Siebert (ed.), PCR Technique:RT-PCR, Eaton Publishing Company/BioTechniques Books (1995).

[0156] PCR and hybridization methods may be used to identify and/or isolate nucleic acid molecules of the present invention including allelic variants, homologous nucleic acid molecules and fragments. PCR and hybridization methods may also be used to identify, amplify and/or isolate nucleic acid molecules of the present invention that encode homologous proteins, analogs, fusion protein or muteins of the invention. Nucleic acid primers as described herein can be used to prime amplification of nucleic acid molecules of the invention, using transcript-derived or genomic DNA as template.

[0157] These nucleic acid primers can also be used, for example, to prime single base extension (SBE) for SNP detection (See, e.g., U.S. Pat. No. 6,004,744, the disclosure of which is incorporated herein by reference in its entirety).

[0158] Isothermal amplification approaches, such as rolling circle amplification, are also now well-described. See, e.g., Schweitzer et al., Curr. Opin. Biotechnol. 12(1): 21-7 (2001); international patent publications WO 97/19193 and WO 00/15779, and U.S. Pat. Nos. 5,854,033 and 5,714,320, the disclosures of which are incorporated herein by reference in their entireties. Rolling circle amplification can be combined with other techniques to facilitate SNP detection. See, e.g., Lizardi et al., Nature Genet. 19(3): 225-32 (1998).

[0159] Nucleic acid molecules of the present invention may be bound to a substrate either covalently or noncovalently. The substrate can be porous or solid, planar or non-planar, unitary or distributed. The bound nucleic acid molecules may be used as hybridization probes, and may be labeled or unlabeled. In a preferred embodiment, the bound nucleic acid molecules are unlabeled.

[0160] In one embodiment, the nucleic acid molecule of the present invention is bound to a porous substrate, e.g., a membrane, typically comprising nitrocellulose, nylon, or positively charged derivatized nylon. The nucleic acid molecule of the present invention can be used to detect a hybridizing nucleic acid molecule that is present within a labeled nucleic acid sample, e.g., a sample of transcript-derived nucleic acids. In another embodiment, the nucleic acid molecule is bound to a solid substrate, including, without limitation, glass, amorphous silicon, crystalline silicon or plastics. Examples of plastics include, without limitation, polymethylacrylic, polyethylene, polypropylene, polyacrylate, polymethylmethacrylate, polyvinylchloride, polytetrafluoroethylene, polystyrene, polycarbonate, polyacetal, polysulfone, celluloseacetate, cellulosenitrate, nitrocellulose, or mixtures thereof. The solid substrate may be any shape, including rectangular, disk-like and spherical. In a preferred embodiment, the solid substrate is a microscope slide or slide-shaped substrate.

[0161] The nucleic acid molecule of the present invention can be attached covalently to a surface of the support substrate or applied to a derivatized surface in a chaotropic agent that facilitates denaturation and adherence by presumed noncovalent interactions, or some combination thereof. The nucleic acid molecule of the present invention can be bound to a substrate to which a plurality of other nucleic acids are concurrently bound, hybridization to each of the plurality of bound nucleic acids being separately detectable. At low density, e.g. on a porous membrane, these substrate-bound collections are typically denominated macroarrays; at higher density, typically on a solid support, such as glass, these substrate bound collections of plural nucleic acids are colloquially termed microarrays. As used herein, the term microarray includes arrays of all densities. It is, therefore, another aspect of the invention to provide microarrays that comprise one or more of the nucleic acid molecules of the present invention.

[0162] In yet another embodiment, the invention is directed to single exon probes based on the ESNAs disclosed herein.

[0163] Expression Vectors, Host Cells and Recombinant Methods of Producing Polypeptides

[0164] Another aspect of the present invention provides vectors that comprise one or more of the isolated nucleic acid molecules of the present invention, and host cells in which such vectors have been introduced.

[0165] The vectors can be used, inter alia, for propagating the nucleic acid molecules of the present invention in host cells (cloning vectors), for shuttling the nucleic acid molecules of the present invention between host cells derived from disparate organisms (shuttle vectors), for inserting the nucleic acid molecules of the present invention into host cell chromosomes (insertion vectors), for expressing sense or antisense RNA transcripts of the nucleic acid molecules of the present invention in vitro or within a host cell, and for expressing polypeptides encoded by the nucleic acid molecules of the present invention, alone or as fusion proteins with heterologous polypeptides (expression vectors). Vectors are by now well known in the art, and are described, inter alia, in Jones et al. (eds.), Vectors: Cloning Applications: Essential Techniques (Essential Techniques Series), John Wiley & Son Ltd. (1998); Jones et al. (eds.), Vectors: Expression Systems: Essential Techniques (Essential Techniques Series), John Wiley & Son Ltd. (1998); Gacesa et al., Vectors: Essential Data, John Wiley & Sons Ltd. (1995); Cid-Arregui (eds.), Viral Vectors: Basic Science and Gene Therapy, Eaton Publishing Co. (2000); Sambrook (2001), supra; Ausubel (1999), supra. Furthermore, a variety of vectors are available commercially. Use of existing vectors and modifications thereof are well within the skill in the art. Thus, only basic features need be described here.

[0166] Nucleic acid sequences may be expressed by operatively linking them to an expression control sequence in an appropriate expression vector and employing that expression vector to transform an appropriate unicellular host. Expression control sequences are sequences that control the transcription, post-transcriptional events and translation of nucleic acid sequences. Such operative linking of a nucleic sequence of this invention to an expression control sequence, of course, includes, if not already part of the nucleic acid sequence, the provision of a translation initiation codon, ATG or GTG, in the correct reading frame upstream of the nucleic acid sequence.

[0167] A wide variety of host/expression vector combinations may be employed in expressing the nucleic acid sequences of this invention. Useful expression vectors, for example, may consist of segments of chromosomal, non-chromosomal and synthetic nucleic acid sequences.

[0168] In one embodiment, prokaryotic cells may be used with an appropriate vector. Prokaryotic host cells are often used for cloning and expression. In a preferred embodiment, prokaryotic host cells include E. coli, Pseudomonas, Bacillus and Streptomyces. In a preferred embodiment, bacterial host cells are used to express the nucleic acid molecules of the instant invention. Useful expression vectors for bacterial hosts include bacterial plasmids, such as those from E. coli, Bacillus or Streptomyces, including pBluescript, pGEX-2T, pUC vectors, col E1, pCR1, pBR322, pMB9 and their derivatives, wider host range plasmids, such as RP4, phage DNAs, e.g. the numerous derivatives of phage lambda, e.g., NM989, λGT10 and λGT11, and other phages, e.g., M13 and filamentous single stranded phage DNA. Where E. coli is used as host, selectable markers are, analogously, chosen for selectivity in gram negative bacteria: e.g., typical markers confer resistance to antibiotics, such as ampicillin, tetracycline, chloramphenicol, kanamycin, streptomycin and zeocin; auxotrophic markers can also be used.

[0169] In other embodiments, eukaryotic host cells, such as yeast, insect, mammalian or plant cells, may be used. Yeast cells, typically S. cerevisiae, are useful for eukaryotic genetic studies, due to the ease of targeting genetic changes by homologous recombination and the ability to easily complement genetic defects using recombinantly expressed proteins. Yeast cells are useful for identifying interacting protein components, e.g. through use of a two-hybrid system. In a preferred embodiment, yeast cells are useful for protein expression. Vectors of the present invention for use in yeast will typically, but not invariably, contain an origin of replication suitable for use in yeast and a selectable marker that is functional in yeast. Yeast vectors include Yeast Integrating plasmids (e.g., YIp5) and Yeast Replicating plasmids (the YRp and YEp series plasmids), Yeast Centromere plasmids (the YCp series plasmids), Yeast Artificial Chromosomes (YACs) which are based on yeast linear plasmids, denoted YLp, pGPD-2, 2μ plasmids and derivatives thereof, and improved shuttle vectors such as those described in Gietz et al., Gene, 74: 527-34 (1988) (YIplac, YEplac and YCplac). Selectable markers in yeast vectors include a variety of auxotrophic markers, the most common of which are (in Saccharomyces cerevisiae) URA3, HIS3, LEU2, TRP1 and LYS2, which complement specific auxotrophic mutations, such as ura3-52, his3-D1, leu2-D1, trp1-D1 and lys2-201.

[0170] Insect cells may be chosen for high efficiency protein expression. Where the host cells are from Spodoptera frugiperda, e.g., Sf9 and Sf21 cell lines, and expresSF™ cells (Protein Sciences Corp., Meriden, Conn., USA), the vector replicative strategy is typically based upon the baculovirus life cycle. Typically, baculovirus transfer vectors are used to replace the wild-type AcMNPV polyhedrin gene with a heterologous gene of interest. Sequences that flank the polyhedrin gene in the wild-type genome are positioned 5′ and 3′ of the expression cassette on the transfer vectors. Following co-transfection with AcMNPV DNA, a homologous recombination event occurs between these sequences resulting in a recombinant virus carrying the gene of interest and the polyhedrin or p10 promoter. Selection can be based upon visual screening for lacZ fusion activity.

[0171] The host cells may also be mammalian cells, which are particularly useful for expression of proteins intended as pharmaceutical agents, and for screening of potential agonists and antagonists of a protein or a physiological pathway. Mammalian vectors intended for autonomous extrachromosomal replication will typically include a viral origin, such as the SV40 origin (for replication in cell lines expressing the large T-antigen, such as COS1 and COS7 cells), the papillomavirus origin, or the EBV origin for long term episomal replication (for use, e.g., in 293-EBNA cells, which constitutively express the EBV EBNA-1 gene product and adenovirus E1A). Vectors intended for integration, and thus replication as part of the mammalian chromosome, can, but need not, include an origin of replication functional in mammalian cells, such as the SV40 origin. Vectors based upon viruses, such as adenovirus, adeno-associated virus, vaccinia virus, and various mammalian retroviruses, will typically replicate according to the viral replicative strategy. Selectable markers for use in mammalian cells include, include but are not limited to, resistance to neomycin (G418), blasticidin, hygromycin and zeocin, and selection based upon the purine salvage pathway using HAT medium.

[0172] Expression in mammalian cells can be achieved using a variety of plasmids, including pSV2, pBC12BI, and p91023, as well as lytic virus vectors (e.g., vaccinia virus, adeno virus, and baculovirus), episomal virus vectors (e.g., bovine papillomavirus), and retroviral vectors (e.g., murine retroviruses). Useful vectors for insect cells include baculoviral vectors and pVL 941.

[0173] Plant cells can also be used for expression, with the vector replicon typically derived from a plant virus (e.g., cauliflower mosaic virus, CaMV; tobacco mosaic virus, TMV) and selectable markers chosen for suitability in plants.

[0174] It is known that codon usage of different host cells may be different. For example, a plant cell and a human cell may exhibit a difference in codon preference for encoding a particular amino acid. As a result, human mRNA may not be efficiently translated in a plant, bacteria or insect host cell. Therefore, another embodiment of this invention is directed to codon optimization. The codons of the nucleic acid molecules of the invention may be modified to resemble, as much as possible, genes naturally contained within the host cell without altering the amino acid sequence encoded by the nucleic acid molecule.

[0175] Any of a wide variety of expression control sequences may be used in these vectors to express the nucleic acid molecules of this invention. Such useful expression control sequences include the expression control sequences associated with structural genes of the foregoing expression vectors. Expression control sequences that control transcription include, e.g., promoters, enhancers and transcription termination sites. Expression control sequences in eukaryotic cells that control post-transcriptional events include splice donor and acceptor sites and sequences that modify the half-life of the transcribed RNA, e.g., sequences that direct poly(A) addition or binding sites for RNA-binding proteins. Expression control sequences that control translation include ribosome binding sites, sequences which direct targeted expression of the polypeptide to or within particular cellular compartments, and sequences in the 5′ and 3′ untranslated regions that modify the rate or efficiency of translation.

[0176] Examples of useful expression control sequences for a prokaryote, e.g., E. coli, will include a promoter, often a phage promoter, such as phage lambda pL promoter, the trc promoter, a hybrid derived from the trp and lac promoters, the bacteriophage T7 promoter (in E. coli cells engineered to express the T7 polymerase), the TAC or TRC system, the major operator and promoter regions of phage lambda, the control regions of fd coat protein, and the araBAD operon. Prokaryotic expression vectors may further include transcription terminators, such as the aspA terminator, and elements that facilitate translation, such as a consensus ribosome binding site and translation termination codon, Schomer et al., Proc. Natl. Acad. Sci. USA 83: 8506-8510 (1986).

[0177] Expression control sequences for yeast cells, typically S. cerevisiae, will include a yeast promoter, such as the CYC1 promoter, the GAL1 promoter, the GAL10 promoter, ADH1 promoter, the promoters of the yeast α-mating system, or the GPD promoter, and will typically have elements that facilitate transcription termination, such as the transcription termination signals from the CYC1 or ADH1 gene.

[0178] Expression vectors useful for expressing proteins in mammalian cells will include a promoter active in mammalian cells. These promoters include, but are not limited to, those derived from mammalian viruses, such as the enhancer-promoter sequences from the immediate early gene of the human cytomegalovirus (CMV), the enhancer-promoter sequences from the Rous sarcoma virus long terminal repeat (RSV LTR), the enhancer-promoter from SV40 and the early and late promoters of adenovirus. Other expression control sequences include the promoter for 3-phosphoglycerate kinase or other glycolytic enzymes, the promoters of acid phosphatase. Other expression control sequences include those from the gene comprising the ESNA of interest. Often, expression is enhanced by incorporation of polyadenylation sites, such as the late SV40 polyadenylation site and the polyadenylation signal and transcription termination sequences from the bovine growth hormone (BGH) gene, and ribosome binding sites. Furthermore, vectors can include introns, such as intron II of rabbit β-globin gene and the SV40 splice elements.

[0179] Preferred nucleic acid vectors also include a selectable or amplifiable marker gene and means for amplifying the copy number of the gene of interest. Such marker genes are well known in the art. Nucleic acid vectors may also comprise stabilizing sequences (e.g., ori- or ARS-like sequences and telomere-like sequences), or may alternatively be designed to favor directed or non-directed integration into the host cell genome. In a preferred embodiment, nucleic acid sequences of this invention are inserted in frame into an expression vector that allows a high level expression of an RNA which encodes a protein comprising the encoded nucleic acid sequence of interest. Nucleic acid cloning and sequencing methods are well known to those of skill in the art and are described in an assortment of laboratory manuals, including Sambrook (1989), supra, Sambrook (2000), supra; and Ausubel (1992), supra, Ausubel (1999), supra. Product information from manufacturers of biological, chemical and immunological reagents also provide useful information.

[0180] Expression vectors may be either constitutive or inducible. Inducible vectors include either naturally inducible promoters, such as the trc promoter, which is regulated by the lac operon, and the pL promoter, which is regulated by tryptophan, the MMTV-LTR promoter, which is inducible by dexamethasone, or can contain synthetic promoters and/or additional elements that confer inducible control on adjacent promoters. Examples of inducible synthetic promoters are the hybrid Plac/ara-1 promoter and the PLtetO-1 promoter. The PLtetO-1 promoter takes advantage of the high expression levels from the PL promoter of phage lambda, but replaces the lambda repressor sites with two copies of operator 2 of the Tn10 tetracycline resistance operon, causing this promoter to be tightly repressed by the Tet repressor protein and induced in response to tetracycline (Tc) and Tc derivatives such as anhydrotetracycline. Vectors may also be inducible because they contain hormone response elements, such as the glucocorticoid response element (GRE) and the estrogen response element (ERE), which can confer hormone inducibility where vectors are used for expression in cells having the respective hormone receptors. To reduce background levels of expression, elements responsive to ecdysone, an insect hormone, can be used instead, with coexpression of the ecdysone receptor.

[0181] In one embodiment of the invention, expression vectors can be designed to fuse the expressed polypeptide to small protein tags that facilitate purification and/or visualization. Such tags include a polyhistidine tag that facilitates purification of the fusion protein by immobilized metal affinity chromatography, for example using NiNTA resin (Qiagen Inc., Valencia, Calif., USA) or TALON™ resin (cobalt immobilized affinity chromatography medium, Clontech Labs, Palo Alto, Calif., USA). The fusion protein can include a chitin-binding tag and self-excising intein, permitting chitin-based purification with self-removal of the fused tag (IMPACT™ system, New England Biolabs, Inc., Beverley, Mass., USA). Alternatively, the fusion protein can include a calmodulin-binding peptide tag, permitting purification by calmodulin affinity resin (Stratagene, La Jolla, Calif., USA), or a specifically excisable fragment of the biotin carboxylase carrier protein, permitting purification of in vivo biotinylated protein using an avidin resin and subsequent tag removal (Promega, Madison, Wis., USA). As another useful alternative, the polypeptides of the present invention can be expressed as a fusion to glutathione-S-transferase, the affinity and specificity of binding to glutathione permitting purification using glutathione affinity resins, such as Glutathione-Superflow Resin (Clontech Laboratories, Palo Alto, Calif., USA), with subsequent elution with free glutathione. Other tags include, for example, the Xpress epitope, detectable by anti-Xpress antibody (Invitrogen, Carlsbad, Calif., USA), a myc tag, detectable by anti-myc tag antibody, the V5 epitope, detectable by anti-V5 antibody (Invitrogen, Carlsbad, Calif., USA), FLAG® epitope, detectable by anti-FLAGS antibody (Stratagene, La Jolla, Calif., USA), and the HA epitope, detectable by anti-HA antibody.

[0182] For secretion of expressed polypeptides, vectors can include appropriate sequences that encode secretion signals, such as leader peptides. For example, the pSecTag2 vectors (Invitrogen, Carlsbad, Calif., USA) are 5.2 kb mammalian expression vectors that carry the secretion signal from the V-J2-C region of the mouse Ig kappa-chain for efficient secretion of recombinant proteins from a variety of mammalian cell lines.

[0183] Expression vectors can also be designed to fuse proteins encoded by the heterologous nucleic acid insert to polypeptides that are larger than purification and/or identification tags. Useful protein fusions include those that permit display of the encoded protein on the surface of a phage or cell, fusions to intrinsically fluorescent proteins, such as those that have a green fluorescent protein (GFP)-like chromophore, fusions to the IgG Fc region, and fusions for use in two hybrid systems.

[0184] Vectors for phage display fuse the encoded polypeptide to, e.g., the gene III protein (pIII) or gene VIII protein (pVIII) for display on the surface of filamentous phage, such as M13. See Barbas et al., Phage Display: A Laboratory Manual, Cold Spring Harbor Laboratory Press (2001); Kay et al. (eds.), Phage Display of Peptides and Proteins: A Laboratory Manual, Academic Press, Inc., (1996); Abelson et al. (eds.), Combinatorial Chemistry (Methods in Enzymology, Vol. 267) Academic Press (1996). Vectors for yeast display, e.g. the pYD1 yeast display vector (Invitrogen, Carlsbad, Calif., USA), use the α-agglutinin yeast adhesion receptor to display recombinant protein on the surface of S. cerevisiae. Vectors for mammalian display, e.g., the pDisplay™ vector (Invitrogen, Carlsbad, Calif., USA), target recombinant proteins using an N-terminal cell surface targeting signal and a C-terminal transmembrane anchoring domain of platelet derived growth factor receptor.

[0185] A wide variety of vectors now exist that fuse proteins encoded by heterologous nucleic acids to the chromophore of the substrate-independent, intrinsically fluorescent green fluorescent protein from Aequorea victoria (“GFP”) and its variants. The GFP-like chromophore can be selected from GFP-like chromophores found in naturally occurring proteins, such as A. victoria GFP (GenBank accession number AAA27721), Renilla reniformis GFP, FP583 (GenBank accession no. AF168419) (DsRed), FP593 (AF272711), FP483 (AF168420), FP484 (AF168424), FP595 (AF246709), FP486 (AF168421), FP538 (AF168423), and FP506 (AF168422), and need include only so much of the native protein as is needed to retain the chromophore's intrinsic fluorescence. Methods for determining the minimal domain required for fluorescence are known in the art. See Li et al., J. Biol. Chem. 272: 28545-28549 (1997). Alternatively, the GFP-like chromophore can be selected from GFP-like chromophores modified from those found in nature. The methods for engineering such modified GFP-like chromophores and testing them for fluorescence activity, both alone and as part of protein fusions, are well known in the art. See Heim et al., Curr. Biol. 6: 178-182 (1996) and Palm et al., Methods Enzymol. 302: 378-394 (1999). A variety of such modified chromophores are now commercially available and can readily be used in the fusion proteins of the present invention. These include EGFP (“enhanced GFP”), EBFP (“enhanced blue fluorescent protein”), BFP2, EYFP (“enhanced yellow fluorescent protein”), ECFP (“enhanced cyan fluorescent protein”) or Citrine. EGFP (see, e.g, Cormack et al., Gene 173: 33-38 (1996); U.S. Pat. Nos. 6,090,919 and 5,804,387, the disclosures of which are incorporated herein by reference in their entireties) is found on a variety of vectors, both plasmid and viral, which are available commercially (Clontech Labs, Palo Alto, Calif., USA); EBFP is optimized for expression in mammalian cells whereas BFP2, which retains the original jellyfish codons, can be expressed in bacteria (see, e.g,. Heim et al., Curr. Biol. 6: 178-182 (1996) and Cormack et al., Gene 173: 33-38 (1996)). Vectors containing these blue-shifted variants are available from Clontech Labs (Palo Alto, Calif., USA). Vectors containing EYFP, ECFP (see, e.g. Heim et al., Curr. Biol. 6: 178-182 (1996); Miyawaki et al., Nature 388: 882-887 (1997)) and Citrine (see, e.g., Heikal et al., Proc. Natl. Acad. Sci. USA 97: 11996-12001 (2000)) are also available from Clontech Labs. The GFP-like chromophore can also be drawn from other modified GFPs, including those described in U.S. Pat. Nos. 6,124,128; 6,096,865; 6,090,919; 6,066,476; 6,054,321; 6,027,881; 5,968,750; 5,874,304; 5,804,387; 5,777,079; 5,741,668; and 5,625,048, the disclosures of which are incorporated herein by reference in their entireties. See also Conn (ed.), Green Fluorescent Protein (Methods in Enzymology, Vol. 302), Academic Press, Inc. (1999); Yang, et al., J Biol Chem, 273: 8212-6 (1998); Bevis et al., Nature Biotechnology, 20:83-7 (2002). The GFP-like chromophore of each of these GFP variants can usefully be included in the fusion proteins of the present invention.

[0186] Fusions to the IgG Fc region increase serum half-life of protein pharmaceutical products through interaction with the FcRn receptor (also denominated the FcRp receptor and the Brambell receptor, FcRb), further described in International Patent Application nos. WO 97/43316, WO 97/34631, WO 96/32478, WO 96/18412, the disclosures of which are incorporated herein by reference in their entireties.

[0187] For long-term, high-yield recombinant production of the polypeptides of the present invention, stable expression is preferred. Stable expression is readily achieved by integration into the host cell genome of vectors having selectable markers, followed by selection of these integrants. Vectors such as pUB6/V5-His A, B, and C (Invitrogen, Carlsbad, Calif., USA) are designed for high-level stable expression of heterologous proteins in a wide range of mammalian tissue types and cell lines. pUB6/V5-His uses the promoter/enhancer sequence from the human ubiquitin C gene to drive expression of recombinant proteins: expression levels in 293, CHO, and NIH3T3 cells are comparable to levels from the CMV and human EF-1a promoters. The bsd gene permits rapid selection of stably transfected mammalian cells with the potent antibiotic blasticidin.

[0188] Replication incompetent retroviral vectors, typically derived from Moloney murine leukemia virus, also are useful for creating stable transfectants having integrated provirus. The highly efficient transduction machinery of retroviruses, coupled with the availability of a variety of packaging cell lines such as RetroPack™ PT 67, EcoPack2™-293, AmphoPack-293, and GP2-293 cell lines (all available from Clontech Laboratories, Palo Alto, Calif., USA) allow a wide host range to be infected with high efficiency; varying the multiplicity of infection readily adjusts the copy number of the integrated provirus.

[0189] Of course, not all vectors and expression control sequences will function equally well to express the nucleic acid molecules of this invention. Neither will all hosts function equally well with the same expression system. However, one of skill in the art may make a selection among these vectors, expression control sequences and hosts without undue experimentation and without departing from the scope of this invention. For example, in selecting a vector, the host must be considered because the vector must be replicated in it. The vector's copy number, the ability to control that copy number, the ability to control integration, if any, and the expression of any other proteins encoded by the vector, such as antibiotic or other selection markers, should also be considered. The present invention further includes host cells comprising the vectors of the present invention, either present episomally within the cell or integrated, in whole or in part, into the host cell chromosome. Among other considerations, some of which are described above, a host cell strain may be chosen for its ability to process the expressed polypeptide in the desired fashion. Such post-translational modifications of the polypeptide include, but are not limited to, acetylation, carboxylation, glycosylation, phosphorylation, lipidation, and acylation, and it is an aspect of the present invention to provide ESPs with such post-translational modifications.

[0190] In selecting an expression control sequence, a variety of factors should also be considered. These include, for example, the relative strength of the sequence, its controllability, and its compatibility with the nucleic acid molecules of this invention, particularly with regard to potential secondary structures. Unicellular hosts should be selected by consideration of their compatibility with the chosen vector, the toxicity of the product coded for by the nucleic acid sequences of this invention, their secretion characteristics, their ability to fold the polypeptide correctly, their fermentation or culture requirements, and the ease of purification from them of the products coded for by the nucleic acid molecules of this invention.

[0191] The recombinant nucleic acid molecules and more particularly, the expression vectors of this invention may be used to express the polypeptides of this invention as recombinant polypeptides in a heterologous host cell. The polypeptides of this invention may be full-length or less than full-length polypeptide fragments recombinantly expressed from the nucleic acid molecules according to this invention. Such polypeptides include analogs, derivatives and muteins that may or may not have biological activity.

[0192] Vectors of the present invention will also often include elements that permit in vitro transcription of RNA from the inserted heterologous nucleic acid. Such vectors typically include a phage promoter, such as that from T7, T3, or SP6, flanking the nucleic acid insert. Often two different such promoters flank the inserted nucleic acid, permitting separate in vitro production of both sense and antisense strands.

[0193] Transformation and other methods of introducing nucleic acids into a host cell (e.g., conjugation, protoplast transformation or fusion, transfection, electroporation, liposome delivery, membrane fusion techniques, high velocity DNA-coated pellets, viral infection and protoplast fusion) can be accomplished by a variety of methods which are well known in the art (See, for instance, Ausubel, supra, and Sambrook et al., supra). Bacterial, yeast, plant or mammalian cells are transformed or transfected with an expression vector, such as a plasmid, a cosmid, or the like, wherein the expression vector comprises the nucleic acid of interest. Alternatively, the cells may be infected by a viral expression vector comprising the nucleic acid of interest. Depending upon the host cell, vector, and method of transformation used, transient or stable expression of the polypeptide will be constitutive or inducible. One having ordinary skill in the art will be able to decide whether to express a polypeptide transiently or stably, and whether to express the protein constitutively or inducibly.

[0194] A wide variety of unicellular host cells are useful in expressing the DNA sequences of this invention. These hosts may include well known eukaryotic and prokaryotic hosts, such as strains of, fungi, yeast, insect cells such as Spodoptera frugiperda (SF9), animal cells such as CHO, as well as plant cells in tissue culture. Representative examples of appropriate host cells include, but are not limited to, bacterial cells, such as E. coli, Caulobacter crescentus, Streptomyces species, and Salmonella typhimurium; yeast cells, such as Saccharomyces cerevisiae, Schizosaccharomyces pombe, Pichia pastoris, Pichia methanolica; insect cell lines, such as those from Spodoptera frugiperda—e.g., Sf9 and Sf21 cell lines, and expresSF™ cells (Protein Sciences Corp., Meriden, Conn., USA)—Drosophila S2 cells, and Trichoplusia ni High Five® Cells (Invitrogen, Carlsbad, Calif., USA); and mammalian cells. Typical mammalian cells include BHK cells, BSC 1 cells, BSC 40 cells, BMT 10 cells, VERO cells, COS1 cells, COS7 cells, Chinese hamster ovary (CHO) cells, 3T3 cells, NIH 3T3 cells, 293 cells, HEPG2 cells, HeLa cells, L cells, MDCK cells, HEK293 cells, WI38 cells, murine ES cell lines (e.g., from strains 129/SV, C57/BL6, DBA-1, 129/SVJ), K562 cells, Jurkat cells, and BW5147 cells. Other mammalian cell lines are well known and readily available from the American Type Culture Collection (ATCC). (Manassas, Va., USA) and the National Institute of General Medical Sciences (NIGMS) Human Genetic Cell Repository at the Coriell Cell Repositories (Camden, N.J., USA). Cells or cell lines derived from endometrial are particularly preferred because they may provide a more native post-translational processing. Particularly preferred are human endometrial cells.

[0195] Particular details of the transfection, expression and purification of recombinant proteins are well documented and are understood by those of skill in the art. Further details on the various technical aspects of each of the steps used in recombinant production of foreign genes in bacterial cell expression systems can be found in a number of texts and laboratory manuals in the art. See, e.g., Ausubel (1992), supra, Ausubel (1999), supra, Sambrook (1989), supra, and Sambrook (2001), supra.

[0196] Methods for introducing the vectors and nucleic acid molecules of the present invention into the host cells are well known in the art; the choice of technique will depend primarily upon the specific vector to be introduced and the host cell chosen.

[0197] Nucleic acid molecules and vectors may be introduced into prokaryotes, such as E. coli, in a number of ways. For instance, phage lambda vectors will typically be packaged using a packaging extract (e.g., Gigapack® packaging extract, Stratagene, La Jolla, Calif., USA), and the packaged virus used to infect E. coli.

[0198] Plasmid vectors will typically be introduced into chemically competent or electrocompetent bacterial cells. E. coli cells can be rendered chemically competent by treatment, e.g., with CaCl₂, or a solution of Mg²⁺, Mn²⁺, Ca²⁺, Rb⁺ or K⁺, dimethyl sulfoxide, dithiothreitol, and hexamine cobalt (III), Hanahan, J. Mol. Biol. 166(4):557-80 (1983), and vectors introduced by heat shock. A wide variety of chemically competent strains are also available commercially (e.g., Epicurian Coli® XL10-Gold® Ultracompetent Cells (Stratagene, La Jolla, Calif., USA); DH5α competent cells (Clontech Laboratories, Palo Alto, Calif., USA); and TOP10 Chemically Competent E. coli Kit (Invitrogen, Carlsbad, Calif., USA)). Bacterial cells can be rendered electrocompetent to take up exogenous DNA by electroporation by various pre-pulse treatments; vectors are introduced by electroporation followed by subsequent outgrowth in selected media. An extensive series of protocols is provided by BioRad (Richmond, Calif., USA).

[0199] Vectors can be introduced into yeast cells by spheroplasting, treatment with lithium salts, electroporation, or protoplast fusion. Spheroplasts are prepared by the action of hydrolytic enzymes such as a snail-gut extract, usually denoted Glusulase or Zymolyase, or an enzyme from Arthrobacter luteus to remove portions of the cell wall in the presence of osmotic stabilizers, typically 1 M sorbitol. DNA is added to the spheroplasts, and the mixture is co-precipitated with a solution of polyethylene glycol (PEG) and Ca²⁺. Subsequently, the cells are resuspended in a solution of sorbitol, mixed with molten agar and then layered on the surface of a selective plate containing sorbitol.

[0200] For lithium-mediated transformation, yeast cells are treated with lithium acetate to permeabilize the cell wall, DNA is added and the cells are co-precipitated with PEG. The cells are exposed to a brief heat shock, washed free of PEG and lithium acetate, and subsequently spread on plates containing ordinary selective medium. Increased frequencies of transformation are obtained by using specially-prepared single-stranded carrier DNA and certain organic solvents. Schiestl et al., Curr. Genet. 16(5-6): 339-46 (1989).

[0201] For electroporation, freshly-grown yeast cultures are typically washed, suspended in an osmotic protectant, such as sorbitol, mixed with DNA, and the cell suspension pulsed in an electroporation device. Subsequently, the cells are spread on the surface of plates containing selective media. Becker et al., Methods Enzymol. 194: 182-187 (1991). The efficiency of transformation by electroporation can be increased over 100-fold by using PEG, single-stranded carrier DNA and cells that are in late log-phase of growth. Larger constructs, such as YACs, can be introduced by protoplast fusion.

[0202] Mammalian and insect cells can be directly infected by packaged viral vectors, or transfected by chemical or electrical means. For chemical transfection, DNA can be coprecipitated with CaPO₄ or introduced using liposomal and nonliposomal lipid-based agents. Commercial kits are available for CaPO₄ transfection (CalPhos™ Mammalian Transfection Kit, Clontech Laboratories, Palo Alto, Calif., USA), and lipid-mediated transfection can be practiced using commercial reagents, such as LIPOFECTAMINE™ 2000, LIPOFECTAMINE™ Reagent, CELLFECTIN® Reagent, and LIPOFECTIN® Reagent (Invitrogen, Carlsbad, Calif., USA), DOTAP Liposomal Transfection Reagent, FuGENE 6, X-tremeGENE Q2, DOSPER, (Roche Molecular Biochemicals, Indianapolis, Ind. USA), Effectene™ PolyFect®, Superfect® (Qiagen, Inc., Valencia, Calif., USA). Protocols for electroporating mammalian cells can be found in, for example,; Norton et al. (eds.), Gene Transfer Methods: Introducing DNA into Living Cells and Organisms, BioTechniques Books, Eaton Publishing Co. (2000). Other transfection techniques include transfection by particle bombardment and microinjection. See, e.g. Cheng et al., Proc. Natl. Acad. Sci. USA 90(10): 4455-9 (1993); Yang et al., Proc. Natl. Acad. Sci. USA 87(24): 9568-72 (1990).

[0203] Production of the recombinantly produced proteins of the present invention can optionally be followed by purification.

[0204] Purification of recombinantly expressed proteins is now well within the skill in the art and thus need not be detailed here. See, e.g., Thorner et al. (eds.), Applications of Chimeric Genes and Hybrid Proteins, Part A: Gene Expression and Protein Purification (Methods in Enzymology, Vol. 326), Academic Press (2000); Harbin (ed.), Cloning, Gene Expression and Protein Purification: Experimental Procedures and Process Rationale, Oxford Univ. Press (2001); Marshak et al., Strategies for Protein Purification and Characterization: A Laboratory Course Manual, Cold Spring Harbor Laboratory Press (1996); and Roe (ed.), Protein Purification Applications, Oxford University Press (2001).

[0205] Briefly, however, if purification tags have been fused through use of an expression vector that appends such tag, purification can be effected, at least in part, by means appropriate to the tag, such as use of immobilized metal affinity chromatography for polyhistidine tags. Other techniques common in the art include ammonium sulfate fractionation, immunoprecipitation, fast protein liquid chromatography (FPLC), high performance liquid chromatography (HPLC), and preparative gel electrophoresis.

Polypeptides, Including Fragments Muteins, Homologous Proteins, Allelic Variants. Analogs and Derivatives

[0206] Another aspect of the invention relates to polypeptides encoded by the nucleic acid molecules described herein. In a preferred embodiment, the polypeptide is a endometrial specific polypeptide (ESP). In an even more preferred embodiment, the polypeptide comprises an amino acid sequence of SEQ ID NO:420-600 or is derived from a polypeptide having the amino acid sequence of SEQ ID NO: 420-600. A polypeptide as defined herein may be produced recombinantly, as discussed supra, may be isolated from a cell that naturally expresses the protein, or may be chemically synthesized following the teachings of the specification and using methods well known to those having ordinary skill in the art.

[0207] Polypeptides of the present invention may also comprise a part or fragment of a ESP. In a preferred embodiment, the fragment is derived from a polypeptide having an amino acid sequence selected from the group consisting of SEQ ID NO: 420-600. Polypeptides of the present invention comprising a part or fragment of an entire ESP may or may not be ESPs. For example, a full-length polypeptide may be endometrial-specific, while a fragment thereof may be found in other tissues as well as in endometrial. A polypeptide that is not a ESP, whether it is a fragment, analog, mutein, homologous protein or derivative, is nevertheless useful, especially for immunizing animals to prepare anti-ESP antibodies. In a preferred embodiment, the part or fragment is a ESP. Methods of determining whether a polypeptide of the present invention is a ESP are described infra.

[0208] Polypeptides of the present invention comprising fragments of at least 6 contiguous amino acids are also useful in mapping B cell and T cell epitopes of the reference protein. See, e.g., Geysen et al., Proc. Natl. Acad. Sci. USA 81: 3998-4002 (1984) and U.S. Pat. Nos. 4,708,871 and 5,595,915, the disclosures of which are incorporated herein by reference in their entireties. Because the fragment need not itself be immunogenic, part of an immunodominant epitope, nor even recognized by native antibody, to be useful in such epitope mapping, all fragments of at least 6 amino acids of a polypeptide of the present invention have utility in such a study.

[0209] Polypeptides of the present invention comprising fragments of at least 8 contiguous amino acids, often at least 15 contiguous amino acids, are useful as immunogens for raising antibodies that recognize polypeptides of the present invention. See, e.g., Lerner, Nature 299: 592-596 (1982); Shinnick et al., Annu. Rev. Microbiol. 37: 425-46 (1983); Sutcliffe et al., Science 219: 660-6 (1983). As further described in the above-cited references, virtually all 8-mers, conjugated to a carrier, such as a protein, prove immunogenic and are capable of eliciting antibody for the conjugated peptide; accordingly, all fragments of at least 8 amino acids of the polypeptides of the present invention have utility as immunogens.

[0210] Polypeptides comprising fragments of at least 8, 9, 10 or 12 contiguous amino acids are also useful as competitive inhibitors of binding of the entire polypeptide, or a portion thereof, to antibodies (as in epitope mapping), and to natural binding partners, such as subunits in a multimeric complex or to receptors or ligands of the subject protein; this competitive inhibition permits identification and separation of molecules that bind specifically to the polypeptide of interest. See U.S. Pat. Nos. 5,539,084 and 5,783,674, incorporated herein by reference in their entireties.

[0211] The polypeptide of the present invention thus preferably is at least 6 amino acids in length, typically at least 8, 9, 10 or 12 amino acids in length, and often at least 15 amino acids in length. Often, the polypeptide of the present invention is at least 20 amino acids in length, even 25 amino acids, 30 amino acids, 35 amino acids, or 50 amino acids or more in length. Of course, larger polypeptides having at least 75 amino acids, 100 amino acids, or even 150 amino acids are also useful, and at times preferred.

[0212] One having ordinary skill in the art can produce fragments by truncating the nucleic acid molecule, e.g., a ESNA, encoding the polypeptide and then expressing it recombinantly. Alternatively, one can produce a fragment by chemically synthesizing a portion of the full-length polypeptide. One may also produce a fragment by enzymatically cleaving either a recombinant polypeptide or an isolated naturally occurring polypeptide. Methods of producing polypeptide fragments are well known in the art. See, e.g., Sambrook (1989), supra; Sambrook (2001), supra; Ausubel (1992), supra; and Ausubel (1999), supra. In one embodiment, a polypeptide comprising only a fragment, preferably a fragment of a ESP, may be produced by chemical or enzymatic cleavage of a ESP polypeptide. In a preferred embodiment, a polypeptide fragment is produced by expressing a nucleic acid molecule of the present invention encoding a fragment, preferably of a ESP, in a host cell.

[0213] Polypeptides of the present invention are also inclusive of mutants, fusion proteins, homologous proteins and allelic variants.

[0214] A mutant protein, or mutein, may have the same or different properties compared to a naturally occurring polypeptide and comprises at least one amino acid insertion, duplication, deletion, rearrangement or substitution compared to the amino acid sequence of a native polypeptide. Small deletions and insertions can often be found that do not alter the function of a protein. Muteins may or may not be endometrial-specific. Preferably, the mutein is endometrial-specific. More preferably the mutein is a polypeptide that comprises at least one amino acid insertion, duplication, deletion, rearrangement or substitution compared to the amino acid sequence of SEQ ID NO: 420-600. Accordingly, in a preferred embodiment, the mutein is one that exhibits at least 50% sequence identity, more preferably at least 60% sequence identity, even more preferably at least 70%, yet more preferably at least 80% sequence identity to a ESP comprising an amino acid sequence of SEQ ID NO: 420-600. In a yet more preferred embodiment, the mutein exhibits at least 85%, more preferably 90%, even more preferably 95% or 96%, and yet more preferably at least 97%, 98%, 99% or 99.5% sequence identity to a ESP comprising an amino acid sequence of SEQ ID NO: 420-600.

[0215] A mutein may be produced by isolation from a naturally occurring mutant cell, tissue or organism. A mutein may be produced by isolation from a cell, tissue or organism that has been experimentally mutagenized. Alternatively, a mutein may be produced by chemical manipulation of a polypeptide, such as by altering the amino acid residue to another amino acid residue using synthetic or semi-synthetic chemical techniques. In a preferred embodiment, a mutein is produced from a host cell comprising a mutated nucleic acid molecule compared to the naturally occurring nucleic acid molecule. For instance, one may produce a mutein of a polypeptide by introducing one or more mutations into a nucleic acid molecule of the invention and then expressing it recombinantly. These mutations may be targeted, in which particular encoded amino acids are altered, or may be untargeted, in which random encoded amino acids within the polypeptide are altered. Muteins with random amino acid alterations can be screened for a particular biological activity or property, particularly whether the polypeptide is endometrial-specific, as described below. Multiple random mutations can be introduced into the gene by methods well known to the art, e.g., by error-prone PCR, shuffling, oligonucleotide-directed mutagenesis, assembly PCR, sexual PCR mutagenesis, in vivo mutagenesis, cassette mutagenesis, recursive ensemble mutagenesis, exponential ensemble mutagenesis and site-specific mutagenesis. Methods of producing muteins with targeted or random amino acid alterations are well known in the art. See, e.g., Sambrook (1989), supra; Sambrook (2001), supra; Ausubel (1992), supra; and Ausubel (1999), as well as U.S. Pat. No. 5,223,408, which is herein incorporated by reference in its entirety.

[0216] The invention also contemplates polypeptides that are homologous to a polypeptide of the invention. In a preferred embodiment, the polypeptide is homologous to a ESP. In an even more preferred embodiment, the polypeptide is homologous to a ESP selected from the group having an amino acid sequence of SEQ ID NO: 420-600. By homologous polypeptide it is means one that exhibits significant sequence identity to a ESP, preferably a ESP having an amino acid sequence of SEQ ID NO: 420-600. By significant sequence identity it is meant that the homologous polypeptide exhibits at least 50% sequence identity, more preferably at least 60% sequence identity, even more preferably at least 70%, yet more preferably at least 80% sequence identity to a ESP comprising an amino acid sequence of SEQ ID NO: 420-600. More preferred are homologous polypeptides exhibiting at least 85%, more preferably 90%, even more preferably 95% or 96%, and yet more preferably at least 97% or 98% sequence identity to a ESP comprising an amino acid sequence of SEQ ID NO: 420-600. Most preferably, the homologous polypeptide exhibits at least 99%, more preferably 99.5%, even more preferably 99.6%, 99.7%, 99.8% or 99.9% sequence identity to a ESP comprising an amino acid sequence of SEQ ID NO: 420-600. In a preferred embodiment, the amino acid substitutions of the homologous polypeptide are conservative amino acid substitutions as discussed above.

[0217] Homologous polypeptides of the present invention also comprise polypeptide encoded by a nucleic acid molecule that selectively hybridizes to a ESNA or an antisense sequence thereof. In this embodiment, it is preferred that the homologous polypeptide be encoded by a nucleic acid molecule that hybridizes to a ESNA under low stringency, moderate stringency or high stringency conditions, as defined herein. More preferred is a homologous polypeptide encoded by a nucleic acid sequence which hybridizes to a ESNA selected from the group consisting of SEQ ID NO: 1-419 or a homologous polypeptide encoded by a nucleic acid molecule that hybridizes to a nucleic acid molecule that encodes a ESP, preferably an ESP of SEQ ID NO:420-600 under low stringency, moderate stringency or high stringency conditions, as defined herein.

[0218] Homologous polypeptides of the present invention may be naturally occurring and derived from another species, especially one derived from another primate, such as chimpanzee, gorilla, rhesus macaque, or baboon, wherein the homologous polypeptide comprises an amino acid sequence that exhibits significant sequence identity to that of SEQ ID NO: 420-600. The homologous polypeptide may also be a naturally occurring polypeptide from a human, when the ESP is a member of a family of polypeptides. The homologous polypeptide may also be a naturally occurring polypeptide derived from a non-primate, mammalian species, including without limitation, domesticated species, e.g., dog, cat, mouse, rat, rabbit, guinea pig, hamster, cow, horse, goat or pig. The homologous polypeptide may also be a naturally occurring polypeptide derived from a non-mammalian species, such as birds or reptiles. The naturally occurring homologous protein may be isolated directly from humans or other species. Alternatively, the nucleic acid molecule encoding the naturally occurring homologous polypeptide may be isolated and used to express the homologous polypeptide recombinantly. The homologous polypeptide may also be one that is experimentally produced by random mutation of a nucleic acid molecule and subsequent expression of the nucleic acid molecule. Alternatively, the homologous polypeptide may be one that is experimentally produced by directed mutation of one or more codons to alter the encoded amino acid of a ESP. In a preferred embodiment, the homologous polypeptide encodes a polypeptide that is a ESP.

[0219] Relatedness of proteins can also be characterized using a second functional test, the ability of a first protein competitively to inhibit the binding of a second protein to an antibody. It is, therefore, another aspect of the present invention to provide isolated polpeptide not only identical in sequence to those described with particularity herein, but also to provide isolated polypeptide (“cross-reactive proteins”) that competitively inhibit the binding of antibodies to all or to a portion of various of the isolated polypeptides of the present invention. Such competitive inhibition can readily be determined using immunoassays well known in the art.

[0220] As discussed above, single nucleotide polymorphisms (SNPs) occur frequently in eukaryotic genomes, and the sequence determined from one individual of a species may differ from other allelic forms present within the population. Thus, polypeptides of the present invention are also inclusive of those encoded by an allelic variant of a nucleic acid molecule encoding a ESP. In this embodiment, it is preferred that the polypeptide be encoded by an allelic variant of a gene that encodes a polypeptide having the amino acid sequence selected from the group consisting of SEQ ID NO: 420-600. More preferred is that the polypeptide be encoded by an allelic variant of a gene that has the nucleic acid sequence selected from the group consisting of SEQ ID NO: 1-419.

[0221] Polypeptides of the present invention are also inclusive of derivative polypeptides encoded by a nucleic acid molecule according to the instant invention. In this embodiment, it is preferred that the polypeptide be a ESP. Also preferred are derivative polypeptides having an amino acid sequence selected from the group consisting of SEQ ID NO: 420-600 and which has been acetylated, carboxylated, phosphorylated, glycosylated, ubiquitinated or other PTMs. In another preferred embodiment, the derivative has been labeled with, e.g., radioactive isotopes such as ¹²⁵I, ³²P, ³⁵S, and ³H. In another preferred embodiment, the derivative has been labeled with fluorophores, chemiluminescent agents, enzymes, and antiligands that can serve as specific binding pair members for a labeled ligand.

[0222] Polypeptide modifications are well known to those of skill and have been described in great detail in the scientific literature. Several particularly common modifications, glycosylation, lipid attachment, sulfation, gamma-carboxylation of glutamic acid residues, hydroxylation and ADP-ribosylation, for instance, are described in most basic texts, such as, for instance Creighton, Protein Structure and Molecular Properties, 2nd ed., W. H. Freeman and Company (1993). Many detailed reviews are available on this subject, such as, for example, those provided by Wold, in Johnson (ed.), Posttranslational Covalent Modification of Proteins, pgs. 1-12, Academic Press (1983); Seifter et al., Meth. Enzymol. 182: 626-646 (1990) and Rattan et al., Ann. N.Y. Acad. Sci. 663: 48-62 (1992).

[0223] One may determine whether a polypeptide of the invention is likely to be post-translationally modified by analyzing the sequence of the polypeptide to determine if there are peptide motifs indicative of sites for post-translational modification. There are a number of computer programs that permit prediction of post-translational modifications. See, e.g., www.expasy.org (accessed Nov. 11, 2002), which includes PSORT, for prediction of protein sorting signals and localization sites, SignalP, for prediction of signal peptide cleavage sites, MITOPROT and Predotar, for prediction of mitochondrial targeting sequences, NetOGlyc, for prediction of type O-glycosylation sites in mammalian proteins, big-PI Predictor and DGPI, for prediction of prenylation-anchor and cleavage sites, and NetPhos, for prediction of Ser, Thr and Tyr phosphorylation sites in eukaryotic proteins. Other computer programs, such as those included in GCG, also may be used to determine post-translational modification peptide motifs.

[0224] General examples of types of post-translational modifications include, but are not limited to: (Z)-dehydrobutyrine; 1-chondroitin sulfate-L-aspartic acid ester; 1′-glycosyl-L-tryptophan; 1′-phospho-L-histidine; 1-thioglycine; 2′-(S-L-cysteinyl)-L-histidine; 2′-[3-carboxamido(trimethylammonio)propyl]-L-histidine; 2′-alpha-mannosyl-L-tryptophan; 2-methyl-L-glutamine; 2-oxobutanoic acid; 2-pyrrolidone carboxylic acid; 3′-(1′-L-histidyl)-L-tyrosine; 3′-(8alpha-FAD)-L-histidine; 3′-(S-L-cysteinyl)-L-tyrosine; 3′, 3″,5′-triiodo-L-thyronine; 3′-4′-phospho-L-tyrosine; 3-hydroxy-L-proline; 3′-methyl-L-histidine; 3-methyl-L-lanthionine; 3′-phospho-L-histidine; 4′-(L-tryptophan)-L-tryptophyl quinone; 42 N-cysteinyl-glycosylphosphatidylinositolethanolamine; 43-(T-L-histidyl)-L-tyrosine; 4-hydroxy-L-arginine; 4-hydroxy-L-lysine; 4-hydroxy-L-proline; 5′-(N-6-L-lysine)-L-topaquinone; 5-hydroxy-L-lysine; 5-methyl-L-arginine; alpha-1-microglobulin-Ig alpha complex chromophore; bis-L-cysteinyl bis-L-histidino diiron disulfide; bis-L-cysteinyl-L-N3′-histidino-L-serinyI tetrairon′ tetrasulfide; chondroitin sulfate D-glucuronyl-D-galactosyl-D-galactosyl-D-xylosyl-L-serine; D-alanine; D-allo-isoleucine; D-asparagine; dehydroalanine; dehydrotyrosine; dermatan 4-sulfate D-glucuronyl-D-galactosyl-D-galactosyl-D-xylosyl-L-serine; D-glucuronyl-N-glycine; dipyrrolylmethanemethyl-L-cysteine; D-leucine; D-methionine; D-phenylalanine; D-serine; D-tryptophan; glycine amide; glycine oxazolecarboxylic acid; glycine thiazolecarboxylic acid; heme P450-bis-L-cysteine-L-tyrosine; heme-bis-L-cysteine; hemediol-L-aspartyl ester-L-glutamyl ester; hemediol-L-aspartyl ester-L-glutamyl ester-L-methionine sulfonium; heme-L-cysteine; heme-L-histidine; heparan sulfate D-glucuronyl-D-galactosyl-D-galactosyl-D-xylosyl-L-serine; heme P450-bis-L-cysteine-L-lysine; hexakis-L-cysteinyl hexairon hexasulfide; keratan sulfate D-glucuronyl-D-galactosyl-D-galactosyl-D-xylosyl-L-threonine; L oxoalanine-lactic acid; L phenyllactic acid; 1′-(8alpha-FAD)-L-histidine; L-2′,4′,5′-topaquinone; L-3′,4′-dihydroxyphenylalanine; L-3′,4′,5′-trihydroxyphenylalanine; L-4′-bromophenylalanine; L-6′-bromotryptophan; L-alanine amide; L-alanyl imidazolinone glycine; L-allysine; L-arginine amide; L-asparagine amide; L-aspartic 4-phosphoric anhydride; L-aspartic acid 1-amide; L-beta-methylthioaspartic acid; L-bromohistidine; L-citrulline; L-cysteine amide; L-cysteine glutathione disulfide; L-cysteine methyl disulfide; L-cysteine methyl ester; L-cysteine oxazolecarboxylic acid; L-cysteine oxazolinecarboxylic acid; L-cysteine persulfide; L-cysteine sulfenic acid; L-cysteine sulfinic acid; L-cysteine thiazolecarboxylic acid; L-cysteinyl homocitryl molybdenum-heptairon-nonasulfide; L-cysteinyl imidazolinone glycine; L-cysteinyl molybdopterin; L-cysteinyl molybdopterin guanine dinucleotide; L-cystine; L-erythro-beta-hydroxyasparagine; L-erythro-beta-hydroxyaspartic acid; L-gamma-carboxyglutamic acid; L-glutamic acid 1-amide; L-glutamic acid 5-methyl ester; L-glutamine amide; L-glutamyl 5-glycerylphosphorylethanolamine; L-histidine amide; L-isoglutamyl-polyglutamic acid; L-isoglutamyl-polyglycine; L-isoleucine amide; L-lanthionine; L-leucine amide; L-lysine amide; L-lysine thiazolecarboxylic acid; L-lysinoalanine; L-methionine amide; L-methionine sulfone; L-phenyalanine thiazolecarboxylic acid; L-phenylalanine amide; L-proline amide; L-selenocysteine; L-selenocysteinyl molybdopterin guanine dinucleotide; L-serine amide; L-serine thiazolecarboxylic acid; L-seryl imidazolinone glycine; L-T-bromophenylalanine; L-T-bromophenylalanine; L-threonine amide; L-thyroxine; L-tryptophan amide; L-tryptophyl quinone; L-tyrosine amide; L-valine amide; meso-lanthionine; N-(L-glutamyl)-L-tyrosine; N-(L-isoaspartyl)-glycine; N-(L-isoaspartyl)-L-cysteine; N,N,N-trimethyl-L-alanine; N,N-dimethyl-L-proline; N2-acetyl-L-lysine; N2-succinyl-L-tryptophan; N4-(ADP-ribosyl)-L-asparagine; N4-glycosyl-L-asparagine; N4-hydroxymethyl-L-asparagine; N4-methyl-L-asparagine; N5-methyl-L-glutamine; N6-1-carboxyethyl-L-lysine; N6-(4-amino hydroxybutyl)-L-lysine; N6-(L-isoglutamyl)-L-lysine; N6-(phospho-5′-adenosine)-L-lysine; N6-(phospho-5′-guanosine)-L-tysine; N6,N6,N6-trimethyl-L-lysine; N6,N6-dimethyl-L-lysine; N6-acetyl-L-lysine; N6-biotinyl-L-lysine; N6-carboxy-L-lysine; N6-formyl-L-lysine; N6-glycyl-L-lysine; N6-lipoyl-L-lysine; N6-methyl-L-lysine; N6-methyl-N-6-poly(N-methyl-propylamine)-L-lysine; N6-mureinyl-L-lysine; N6-myristoyl-L-lysine; N6-palmitoyl-L-lysine; N6-pyridoxal phosphate-L-lysine; N6-pyruvic acid 2-iminyl-L-lysine; N6-retinal-L-lysine; N-acetylglycine; N-acetyl-L-glutamine; N-acetyl-L-alanine; N-acetyl-L-aspartic acid; N-acetyl-L-cysteine; N-acetyl-L-glutamic acid; N-acetyl-L-isoleucine; N-acetyl-L-methionine; N-acetyl-L-proline; N-acetyl-L-serine; N-acetyl-L-threonine; N-acetyl-L-tyrosine; N-acetyl-L-valine; N-alanyl-glycosylphosphatidylinositolethanolamine; N-asparaginyl-glycosylphosphatidylinositolethanolamine; N-aspartyl-glycosylphosphatidylinositolethanolamine; N-formylglycine; N-formyl-L-methionine; N-glycyl-glycosylphosphatidylinositolethanolamine; N-L-glutamyl-poly-L-glutamic acid; N-methylglycine; N-methyl-L-alanine; N-methyl-L-methionine; N-methyl-L-phenylalanine; N-myristoyl-glycine; N-palmitoyl-L-cysteine; N-pyruvic acid 2-iminyl-L-cysteine; N-pyruvic acid 2-iminyl-L-valine; N-seryl-glycosylphosphatidylinositolethanolamine; N-seryl-glycosyESPhingolipidinositolethanolamine; O-(ADP-ribosyl)-L-serine; O-(phospho-5′-adenosine)-L-threonine; O-(phospho-5′-DNA)-L-serine; O-(phospho-5′-DNA)-L-threonine; O-(phospho-5′rRNA)-L-serine; O-(phosphoribosyl dephospho-coenzyme A)-L-serine; O-(sn-1-glycerophosphoryl)-L-serine; 04′-(8alpha-FAD)-L-tyrosine; 04′-(phospho-5′-adenosine)-L-tyrosine; 04′-(phospho-5′-DNA)-L-tyrosine; 04′-(phospho-5′-RNA)-L-tyrosine; 04′-(phospho-5′-uridine)-L-tyrosine; 04-glycosyl-L-hydroxyproline; 04′-glycosyl-L-tyrosine; 04′-sulfo-L-tyrosine; 05-glycosyl-L-hydroxylysine; O-glycosyl-L-serine; O-glycosyl-L-threonine; omega-N-(ADP-ribosyl)-L-arginine; omega-N-omega-N′-dimethyl-L-arginine; omega-N-methyl-L-arginine; omega-N-omega-N-dimethyl-L-arginine; omega-N-phospho-L-arginine; O'octanoyl-L-serine; O-palmitoyl-L-serine; O-palmitoyl-L-threonine; O-phospho-L-serine; O-phospho-L-threonine; O-phosphopantetheine-L-serine; phycoerythrobilin-bis-L-cysteine; phycourobilin-bis-L-cysteine; pyrroloquinoline quinone; pyruvic acid; S hydroxycinnamyl-L-cysteine; S-(2-aminovinyl)methyl-D-eysteine; S-(2-aminovinyl)-D-cysteine; S-(6-FW-L-cysteine; S-(8alpha-FAD)-L-cysteine; S-(ADP-ribosyl)-L-cysteine; S-(L-isoglutamyl)-L-cysteine; S-12-hydroxyfarnesyl-L-cysteine; S-acetyl-L-cysteine; S-diacylglycerol-L-cysteine; S-diphytanylglycerot diether-L-cysteine; S-farnesyl-L-cysteine; S-geranylgeranyl-L-cysteine; S-glycosyl-L-cysteine; S-glycyl-L-cysteine; S-methyl-L-cysteine; S-nitrosyl-L-cysteine; S-palmitoyl-L-cysteine; S-phospho-L-cysteine; S-phycobiliviolin-L-cysteine; S-phycocyanobilin-L-cysteine; S-phycoerythrobilin-L-cysteine; S-phytochromobilin-L-cysteine; S-selenyl-L-cysteine; S-sulfo-L-cysteine; tetrakis-L-cysteinyl diiron disulfide; tetrakis-L-cysteinyl iron; tetrakis-L-cysteinyl tetrairon tetrasulfide; trans-2,3-cis 4-dihydroxy-L-proline; tris-L-cysteinyl triiron tetrasulfide; tris-L-cysteinyl triiron trisulfide; tris-L-cysteinyl-L-aspartato tetrairon tetrasulfide; tris-L-cysteinyl-L-cysteine persulfido-bis-L-glutamato-L-histidino tetrairon disulfide trioxide; tris-L-cysteinyl-L-N3′-histidino tetrairon tetrasulfide; tris-L-cysteinyl-L-N1′-histidino tetrairon tetrasulfide; and tris-L-cysteinyl-L-serinyl tetrairon tetrasulfide.

[0225] Additional examples of PTMs may be found in web sites such as the Delta Mass database based on Krishna, R. G. and F. Wold (1998). Posttranslational Modifications. Proteins—Analysis and Design. R H. Angeletti. San Diego, Academic Press. 1: 121-206.; Methods in Enzymology, 193, J. A. McClosky (ed) (1990), pages 647-660; Methods in Protein Sequence Analysis edited by Kazutomo Imahori and Fumio Sakiyama, Plenum Press, (1993) “Post-translational modifications of proteins” R. G. Krishna and F. Wold pages 167-172; “GlycoSuiteDB: a new curated relational database of glycoprotein glycan structures and their biological sources” Cooper et al. Nucleic Acids Res. 29; 332-335 (2001) “O-GLYCBASE version 4.0: a revised database of O-glycosylated proteins” Gupta et al. Nucleic Acids Research, 27: 370-372 (1999); and “PhosphoBase, a database of phosphorylation sites: release 2.0.”, Kreegipuu et al. Nucleic Acids Res 27(1):237-239 (1999) see also, WO 02/21139A2, the disclosure of which is incorporated herein by reference in its entirety.

[0226] Tumorigenesis is often accompanied by alterations in the post-translational modifications of proteins. Thus, in another embodiment, the invention provides polypeptides from cancerous cells or tissues that have altered post-translational modifications compared to the post-translational modifications of polypeptides from normal cells or tissues. A number of altered post-translational modifications are known. One common alteration is a change in phosphorylation state, wherein the polypeptide from the cancerous cell or tissue is hyperphosphorylated or hypophosphorylated compared to the polypeptide from a normal tissue, or wherein the polypeptide is phosphorylated on different residues than the polypeptide from a normal cell. Another common alteration is a change in glycosylation state, wherein the polypeptide from the cancerous cell or tissue has more or less glycosylation than the polypeptide from a normal tissue, and/or wherein the polypeptide from the cancerous cell or tissue has a different type of glycosylation than the polypeptide from a noncancerous cell or tissue. Changes in glycosylation may be critical because carbohydrate-protein and carbohydrate-carbohydrate interactions are important in cancer cell progression, dissemination and invasion. See, e.g., Barchi, Curr. Pharm. Des. 6: 485-501 (2000), Verma, Cancer Biochem. Biophys. 14: 151-162 (1994) and Dennis et al., Bioessays 5: 412-421 (1999).

[0227] Another post-translational modification that may be altered in cancer cells is prenylation. Prenylation is the covalent attachment of a hydrophobic prenyl group (either farnesyl or geranylgeranyl) to a polypeptide. Prenylation is required for localizing a protein to a cell membrane and is often required for polypeptide function. For instance, the Ras superfamily of GTPase signalling proteins must be prenylated for function in a cell. See, e.g., Prendergast et al., Semin. Cancer Biol. 10: 443-452 (2000) and Khwaja et al., Lancet 355: 741-744 (2000).

[0228] Other post-translation modifications that may be altered in cancer cells include, without limitation, polypeptide methylation, acetylation, arginylation or racemization of amino acid residues. In these cases, the polypeptide from the cancerous cell may exhibit either increased or decreased amounts of the post-translational modification compared to the corresponding polypeptides from noncancerous cells.

[0229] Other polypeptide alterations in cancer cells include abnormal polypeptide cleavage of proteins and aberrant protein-protein interactions. Abnormal polypeptide cleavage may be cleavage of a polypeptide in a cancerous cell that does not usually occur in a normal cell, or a lack of cleavage in a cancerous cell, wherein the polypeptide is cleaved in a normal cell. Aberrant protein-protein interactions may be either covalent cross-linking or non-covalent binding between proteins that do not normally bind to each other. Alternatively, in a cancerous cell, a protein may fail to bind to another protein to which it is bound in a noncancerous cell. Alterations in cleavage or in protein-protein interactions may be due to over- or underproduction of a polypeptide in a cancerous cell compared to that in a normal cell, or may be due to alterations in post-translational modifications (see above) of one or more proteins in the cancerous cell. See, e.g., Henschen-Edman, Ann. N.Y. Acad. Sci. 936: 580-593 (2001).

[0230] Alterations in polypeptide post-translational modifications, as well as changes in polypeptide cleavage and protein-protein interactions, may be determined by any method known in the art. For instance, alterations in phosphorylation may be determined by using anti-phosphoserine, anti-phosphothreonine or anti-phosphotyrosine antibodies or by amino acid analysis. Glycosylation alterations may be determined using antibodies specific for different sugar residues, by carbohydrate sequencing, or by alterations in the size of the glycoprotein, which can be determined by, e.g., SDS polyacrylamide gel electrophoresis (PAGE). Other alterations of post-translational modifications, such as prenylation, racemization, methylation, acetylation and arginylation, may be determined by chemical analysis, protein sequencing, amino acid analysis, or by using antibodies specific for the particular post-translational modifications. Changes in protein-protein interactions and in polypeptide cleavage may be analyzed by any method known in the art including, without limitation, non-denaturing PAGE (for non-covalent protein-protein interactions), SDS PAGE (for covalent protein-protein interactions and protein cleavage), chemical cleavage, protein sequencing or immunoassays.

[0231] In another embodiment, the invention provides polypeptides that have been post-translationally modified. In one embodiment, polypeptides may be modified enzymatically or chemically, by addition or removal of a post-translational modification. For example, a polypeptide may be glycosylated or deglycosylated enzymatically. Similarly, polypeptides may be phosphorylated using a purified kinase, such as a MAP kinase (e.g, p38, ERK, or JNK) or a tyrosine kinase (e.g., Src or erbB2). A polypeptide may also be modified through synthetic chemistry. Alternatively, one may isolate the polypeptide of interest from a cell or tissue that expresses the polypeptide with the desired post-translational modification. In another embodiment, a nucleic acid molecule encoding the polypeptide of interest is introduced into a host cell that is capable of post-translationally modifying the encoded polypeptide in the desired fashion. If the polypeptide does not contain a motif for a desired post-translational modification, one may alter the post-translational modification by mutating the nucleic acid sequence of a nucleic acid molecule encoding the polypeptide so that it contains a site for the desired post-translational modification. Amino acid sequences that may be post-translationally modified are known in the art. See, e.g., the programs described above on the website www.expasy.org. The nucleic acid molecule may also be introduced into a host cell that is capable of post-translationally modifying the encoded polypeptide. Similarly, one may delete sites that are post-translationally modified by either mutating the nucleic acid sequence so that the encoded polypeptide does not contain the post-translational modification motif, or by introducing the native nucleic acid molecule into a host cell that is not capable of post-translationally modifying the encoded polypeptide.

[0232] It will be appreciated, as is well known and as noted above, that polypeptides are not always entirely linear. For instance, polypeptides may be branched as a result of ubiquitination, and they may be circular, with or without branching, generally as a result of posttranslation events, including natural processing event and events brought about by human manipulation which do not occur naturally. Circular, branched and branched circular polypeptides may be synthesized by non-translation natural process and by entirely synthetic methods, as well. Modifications can occur anywhere in a polypeptide, including the peptide backbone, the amino acid side-chains and the amino or carboxyl termini. In fact, blockage of the amino or carboxyl group in a polypeptide, or both, by a covalent modification, is common in naturally occurring and synthetic polypeptides and such modifications may be present in polypeptides of the present invention, as well. For instance, the amino terminal residue of polypeptides made in E. coli, prior to proteolytic processing, almost invariably will be N-formylmethionine.

[0233] Useful post-synthetic (and post-translational) modifications include conjugation to detectable labels, such as fluorophores. A wide variety of amine-reactive and thiol-reactive fluorophore derivatives have been synthesized that react under nondenaturing conditions with N-terminal amino groups and epsilon amino groups of lysine residues, on the one hand, and with free thiol groups of cysteine residues, on the other.

[0234] Kits are available commercially that permit conjugation of proteins to a variety of amine-reactive or thiol-reactive fluorophores: Molecular Probes, Inc. (Eugene, Oreg., USA), e.g., offers kits for conjugating proteins to Alexa Fluor 350, Alexa Fluor 430, Fluorescein-EX, Alexa Fluor 488, Oregon Green 488, Alexa Fluor 532, Alexa Fluor 546, Alexa Fluor 546, Alexa Fluor 568, Alexa Fluor 594, and Texas Red-X.

[0235] A wide variety of other amine-reactive and thiol-reactive fluorophores are available commercially (Molecular Probes, Inc., Eugene, Oreg., USA), including Alexa Fluor® 350, Alexa Fluor® 488, Alexa Fluor® 532, Alexa Fluor® 546, Alexa Fluor® 568, Alexa Fluor® 594, Alexa Fluor® 647 (monoclonal antibody labeling kits available from Molecular Probes, Inc., Eugene, Oreg., USA), BODIPY dyes, such as BODIPY 493/503, BODIPY FL, BODIPY R6G, BODIPY 530/550, BODIPY TMR, BODIPY 558/568, BODIPY 558/568, BODIPY 564/570, BODIPY 576/589, BODIPY 581/591, BODIPY TR, BODIPY 630/650, BODIPY 650/665, Cascade Blue, Cascade Yellow, Dansyl, lissamine rhodamine B, Marina Blue, Oregon Green 488, Oregon Green 514, Pacific Blue, rhodamine 6G, rhodamine green, rhodamine red, tetramethylrhodamine, Texas Red (available from Molecular Probes, Inc., Eugene, Oreg., USA).

[0236] The polypeptides of the present invention can also be conjugated to fluorophores, other proteins, and other macromolecules, using bifunctional linking reagents. Common homobifunctional reagents include, e.g., APG, AEDP, BASED, BMB, BMDB, BMH, BMOE, BM[PEO]3, BM[PEO]4, BS3, BSOCOES, DFDNB, DMA, DMP, DMS, DPDPB, DSG, DSP (Lomant's Reagent), DSS, DST, DTBP, DTME, DTSSP, EGS, HBVS, Sulfo-BSOCOES, Sulfo-DST, Sulfo-EGS (all available from Pierce, Rockford, Ill., USA); common heterobifunctional cross-linkers include ABH, AMAS, ANB-NOS, APDP, ASBA, BMPA, BMPH, BMPS, EDC, EMCA, EMCH, EMCS, KMUA, KMUH, GMBS, LC-SMCC, LC-SPDP, MBS, M2C2H, MPBH, MSA, NHS-ASA, PDPH, PMPI, SADP, SAED, SAND, SANPAH, SASD, SATP, SBAP, SFAD, SIA, SIAB, SMCC, SMPB, SMPH, SMPT, SPDP, Sulfo-EMCS, Sulfo-GMBS, Sulfo-HSAB, Sulfo-KMUS, Sulfo-LC-SPDP, Sulfo-MBS, Sulfo-NHS-LC-ASA, Sulfo-SADP, Sulfo-SANPAH, Sulfo-SIAB, Sulfo-SMCC, Sulfo-SMPB, Sulfo-LC-SMPT, SVSB, TFCS (all available Pierce, Rockford, Ill., USA).

[0237] Polypeptides of the present invention, including full length polypeptides, fragments and fusion proteins, can be conjugated, using such cross-linking reagents, to fluorophores that are not amine- or thiol-reactive. Other labels that usefully can be conjugated to polypeptides of the present invention include radioactive labels, echosonographic contrast reagents, and MRI contrast agents.

[0238] Polypeptides of the present invention, including full length polypeptide, fragments and fusion proteins, can also usefully be conjugated using cross-linking agents to carrier proteins, such as KLH, bovine thyroglobulin, and even bovine serum albumin (BSA), to increase immunogenicity for raising anti-ESP antibodies.

[0239] Polypeptides of the present invention, including full length polypeptide, fragments and fusion proteins, can also usefully be conjugated to polyethylene glycol (PEG); PEGylation increases the serum half life of proteins administered intravenously for replacement therapy. Delgado et al., Crit. Rev. Ther. Drug Carrier Syst. 9(3-4): 249-304 (1992); Scott et al, Curr. Pharm. Des. 4(6): 423-38 (1998); DeSantis et al., Curr. Opin. Biotechnol. 10(4): 324-30 (1999). PEG monomers can be attached to the protein directly or through a linker, with PEGylation using PEG monomers activated with tresyl chloride (2,2,2-trifluoroethanesulphonyl chloride) permitting direct attachment under mild conditions.

[0240] Polypeptides of the present invention are also inclusive of analogs of a polypeptide encoded by a nucleic acid molecule according to the instant invention. In a preferred embodiment, this polypeptide is a ESP. In a more preferred embodiment, this polypeptide is derived from a polypeptide having part or all of the amino acid sequence of SEQ ID NO: 420-600. Also preferred is an analog polypeptide comprising one or more substitutions of non-natural amino acids or non-native inter-residue bonds compared to the naturally occurring polypeptide. In one embodiment, the analog is structurally similar to a ESP, but one or more peptide linkages is replaced by a linkage selected from the group consisting of —CH₂NH—, —CH₂S—, —CH₂—CH₂—, —CH═CH—(cis and trans), —COCH₂—, —CH(OH)CH₂—and —CH₂SO—. In another embodiment, the analog comprises substitution of one or more amino acids of a ESP with a D-amino acid of the same type or other non-natural amino acid in order to generate more stable peptides. D-amino acids can readily be incorporated during chemical peptide synthesis: peptides assembled from D-amino acids are more resistant to proteolytic attack; incorporation of D-amino acids can also be used to confer specific three-dimensional conformations on the peptide. Other amino acid analogues commonly added during chemical synthesis include ornithine, norleucine, phosphorylated amino acids (typically phosphoserine, phosphothreonine, phosphotyrosine), L-malonyltyrosine, a non-hydrolyzable analog of phosphotyrosine (see, e.g., Kole et al., Biochem. Biophys. Res. Com. 209: 817-821 (1995)), and various halogenated phenylalanine derivatives.

[0241] Non-natural amino acids can be incorporated during solid phase chemical synthesis or by recombinant techniques, although the former is typically more common. Solid phase chemical synthesis of peptides is well established in the art. Procedures are described, inter alia, in Chan et al. (eds.), Fmoc Solid Phase Peptide Synthesis: A Practical Approach (Practical Approach Series), Oxford Univ. Press (March 2000); Jones, Amino Acid and Peptide Synthesis (Oxford Chemistry Primers, No 7), Oxford Univ. Press (1992); and Bodanszky, Principles of Peptide Synthesis (Springer Laboratory), Springer Verlag (1993).

[0242] Amino acid analogues having detectable labels are also usefully incorporated during synthesis to provide derivatives and analogs. Biotin, for example can be added using biotinoyl—(9-fluorenylmethoxycarbonyl)-L-lysine (FMOC biocytin) (Molecular Probes, Eugene, Oreg., USA). Biotin can also be added enzymatically by incorporation into a fusion protein of a E. coli BirA substrate peptide. The FMOC and tBOC derivatives of dabcyl-L-lysine (Molecular Probes, Inc., Eugene, Oreg., USA) can be used to incorporate the dabcyl chromophore at selected sites in the peptide sequence during synthesis. The aminonaphthalene derivative EDANS, the most common fluorophore for pairing with the dabcyl quencher in fluorescence resonance energy transfer (FRET) systems, can be introduced during automated synthesis of peptides by using EDANS—FMOC-L-glutamic acid or the corresponding tBOC derivative (both from Molecular Probes, Inc., Eugene, Oreg., USA). Tetramethylrhodamine fluorophores can be incorporated during automated FMOC synthesis of peptides using (FMOC)—TMR-L-lysine (Molecular Probes, Inc. Eugene, Oreg., USA).

[0243] Other useful amino acid analogues that can be incorporated during chemical synthesis include aspartic acid, glutamic acid, lysine, and tyrosine analogues having allyl side-chain protection (Applied Biosystems, Inc., Foster City, Calif., USA); the allyl side chain permits synthesis of cyclic, branched-chain, sulfonated, glycosylated, and phosphorylated peptides.

[0244] A large number of other FMOC-protected non-natural amino acid analogues capable of incorporation during chemical synthesis are available commercially, including, e.g., Fmoc-2-aminobicyclo[2.2.1]heptane-2-carboxylic acid, Fmoc-3-endo-aminobicyclo[2.2.1]heptane-2-endo-carboxylic acid, Fmoc-3-exo-aminobicyclo[2.2.1]heptane-2-exo-carboxylic acid, Fmoc-3-endo-amino-bicyclo[2.2.1]hept-5-ene-2-endo-carboxylic acid, Fmoc-3-exo-amino-bicyclo[2.2.1]hept-5-ene-2-exo-carboxylic acid, Fmoc-cis-2-amino-1-cyclohexanecarboxylic acid, Fmoc-trans-2-amino-1-cyclohexanecarboxylic acid, Fmoc-1-amino-1-cyclopentanecarboxylic acid, Fmoc-cis-2-amino-1-cyclopentanecarboxylic acid, Fmoc-1-amino-1-cyclopropanecarboxylic acid, Fmoc-D-2-amino-4-(ethylthio)butyric acid, Fmoc-L-2-amino-4-(ethylthio)butyric acid, Fmoc-L-buthionine, Fmoc-S-methyl-L-Cysteine, Fmoc-2-aminobenzoic acid (anthranillic acid), Fmoc-3-aminobenzoic acid, Fmoc-4-aminobenzoic acid, Fmoc-2-aminobenzophenone-2′-carboxylic acid, Fmoc-N-(4-aminobenzoyl)-β-alanine, Fmoc-2-amino-4,5-dimethoxybenzoic acid, Fmoc-4-aminohippuric acid, Fmoc-2-amino-3-hydroxybenzoic acid, Fmoc-2-amino-5-hydroxybenzoic acid, Fmoc-3-amino-4-hydroxybenzoic acid, Fmoc-4-amino-3-hydroxybenzoic acid, Fmoc-4-amino-2-hydroxybenzoic acid, Fmoc-5-amino-2-hydroxybenzoic acid, Fmoc-2-amino-3-methoxybenzoic acid, Fmoc-4-amino-3-methoxybenzoic acid, Fmoc-2-amino-3-methylbenzoic acid, Fmoc-2-amino-5-methylbenzoic acid, Fmoc-2-amino-6-methylbenzoic acid, Fmoc-3-amino-2-methylbenzoic acid, Fmoc-3-amino-4-methylbenzoic acid, Fmoc-4-amino-3-methylbenzoic acid, Fmoc-3-amino-2-naphtoic acid, Fmoc-D,L-3-amino-3-phenylpropionic acid, Fmoc-L-Methyldopa, Fmoc-2-amino-4,6-dimethyl-3-pyridinecarboxylic acid, Fmoc-D,L-amino-2-thiophenacetic acid, Fmoc-4-(carboxymethyl)piperazine, Fmoc-4-carboxypiperazine, Fmoc-4-(carboxymethyl)homopiperazine, Fmoc-4-phenyl-4-piperidinecarboxylic acid, Fmoc-L-1,2,3,4-tetrahydronorharman-3-carboxylic acid, Fmoc-L-thiazolidine-4-carboxylic acid, all available from The Peptide Laboratory (Richmond, Calif., USA).

[0245] Non-natural residues can also be added biosynthetically by engineering a suppressor tRNA, typically one that recognizes the UAG stop codon, by chemical aminoacylation with the desired unnatural amino acid. Conventional site-directed mutagenesis is used to introduce the chosen stop codon UAG at the site of interest in the protein gene. When the acylated suppressor tRNA and the mutant gene are combined in an in vitro transcription/translation system, the unnatural amino acid is incorporated in response to the UAG codon to give a protein containing that amino acid at the specified position. Liu et al., Proc. Natl. Acad. Sci. USA 96(9): 4780-5 (1999); Wang et al., Science 292(5516): 498-500 (2001).

[0246] Fusion Proteins

[0247] Another aspect of the present invention relates to the fusion of a polypeptide of the present invention to heterologous polypeptides. In a preferred embodiment, the polypeptide of the present invention is a ESP. In a more preferred embodiment, the polypeptide of the present invention that is fused to a heterologous polypeptide comprises part or all of the amino acid sequence of SEQ ID NO: 420-600, or is a mutein, homologous polypeptide, analog or derivative thereof. In an even more preferred embodiment, the fusion protein is encoded by a nucleic acid molecule comprising all or part of the nucleic acid sequence of SEQ ID NO: 1-419, or comprises all or part of a nucleic acid sequence that selectively hybridizes or is homologous to a nucleic acid molecule comprising a nucleic acid sequence of SEQ ID NO: 1-419.

[0248] The fusion proteins of the present invention will include at least one fragment of a polypeptide of the present invention, which fragment is at least 6, typically at least 8, often at least 15, and usefully at least 16, 17, 18, 19, or 20 amino acids long. The fragment of the polypeptide of the present to be included in the fusion can usefully be at least 25 amino acids long, at least 50 amino acids long, and can be at least 75, 100, or even 150 amino acids long. Fusions that include the entirety of a polypeptide of the present invention have particular utility.

[0249] The heterologous polypeptide included within the fusion protein of the present invention is at least 6 amino acids in length, often at least 8 amino acids in length, and preferably at least 15, 20, or 25 amino acids in length. Fusions that include larger polypeptides, such as the IgG Fc region, and even entire proteins (such as GFP chromophore-containing proteins) are particularly useful.

[0250] As described above in the description of vectors and expression vectors of the present invention, which discussion is incorporated here by reference in its entirety, heterologous polypeptides to be included in the fusion proteins of the present invention can usefully include those designed to facilitate purification and/or visualization of recombinantly-expressed proteins. See, e.g., Ausubel, Chapter 16, (1992), supra. Although purification tags can also be incorporated into fusions that are chemically synthesized, chemical synthesis typically provides sufficient purity that further purification by HPLC suffices; however, visualization tags as above described retain their utility even when the protein is produced by chemical synthesis, and when so included render the fusion proteins of the present invention useful as directly detectable markers of the presence of a polypeptide of the invention.

[0251] As also discussed above, heterologous polypeptides to be included in the fusion proteins of the present invention can usefully include those that facilitate secretion of recombinantly expressed proteins into the periplasmic space or extracellular milieu for prokaryotic hosts or into the culture medium for eukaryotic cells through incorporation of secretion signals and/or leader sequences. For example, a His⁶ tagged protein can be purified on a Ni affinity column and a GST fusion protein can be purified on a glutathione affinity column. Similarly, a fusion protein comprising the Fc domain of IgG can be purified on a Protein A or Protein G column and a fusion protein comprising an epitope tag such as myc can be purified using an immunoaffinity column containing an anti-c-myc antibody. It is preferable that the epitope tag be separated from the protein encoded by the essential gene by an enzymatic cleavage site that can be cleaved after purification. See also the discussion of nucleic acid molecules encoding fusion proteins that may be expressed on the surface of a cell.

[0252] Other useful fusion proteins of the present invention include those that permit use of the polypeptide of the present invention as bait in a yeast two-hybrid system. See Bartel et al. (eds.), The Yeast Two-Hybrid System, Oxford University Press (1997); Zhu et al., Yeast Hybrid Technologies, Eaton Publishing (2000); Fields et al., Trends Genet. 10(8): 286-92 (1994); Mendelsohn et al., Curr. Opin. Biotechnol. 5(5): 482-6 (1994); Luban et al., Curr. Opin. Biotechnol. 6(1): 59-64 (1995); Allen et al., Trends Biochem. Sci. 20(12): 511-6 (1995); Drees, Curr. Opin. Chem. Biol. 3(1): 64-70 (1999); Topcu et al., Pharm. Res. 17(9): 1049-55 (2000); Fashena et al., Gene 250(1-2): 1-14 (2000); Colas et al., Nature 380, 548-550 (1996); Norman, T. et al., Science 285, 591-595 (1999); Fabbrizio et al., Oncogene 18, 4357-4363 (1999); Xu et al., Proc Natl Acad Sci USA. 94, 12473-12478 (1997); Yang, et al., Nuc. Acids Res. 23, 1152-1156 (1995); Kolonin et al., Proc Natl Acad Sci USA 95, 14266-14271 (1998); Cohen et al., Proc Natl Acad Sci USA 95, 14272-14277 (1998); Uetz, et al. Nature 403, 623-627(2000); Ito, et al., Proc Natl Acad Sci USA 98, 4569-4574 (2001). Typically, such fusion is to either E. coli LexA or yeast GAL4 DNA binding domains. Related bait plasmids are available that express the bait fused to a nuclear localization signal.

[0253] Other useful fusion proteins include those that permit display of the encoded polypeptide on the surface of a phage or cell, fusions to intrinsically fluorescent proteins, such as green fluorescent protein (GFP), and fusions to the IgG Fc region, as described above.

[0254] The polypeptides of the present invention can also usefully be fused to protein toxins, such as Pseudomonas exotoxin A, diphtheria toxin, shiga toxin A, anthrax toxin lethal factor, ricin, in order to effect ablation of cells that bind or take up the proteins of the present invention.

[0255] Fusion partners include, inter alia, myc, hemagglutinin (HA), GST, immunoglobulins, β-galactosidase, biotin trpE, protein A, β-lactamase, α-amylase, maltose binding protein, alcohol dehydrogenase, polyhistidine (for example, six histidine at the amino and/or carboxyl terminus of the polypeptide), lacZ, green fluorescent protein (GFP), yeast α mating factor, GAL4 transcription activation or DNA binding domain, luciferase, and serum proteins such as ovalbumin, albumin and the constant domain of IgG. See, e.g., Ausubel (1992), supra and Ausubel (1999), supra. Fusion proteins may also contain sites for specific enzymatic cleavage, such as a site that is recognized by enzymes such as Factor XIII, trypsin, pepsin, or any other enzyme known in the art. Fusion proteins will typically be made by either recombinant nucleic acid methods, as described above, chemically synthesized using techniques well known in the art (e.g. a Merrifield synthesis), or produced by chemical cross-linking.

[0256] Another advantage of fusion proteins is that the epitope tag can be used to bind the fusion protein to a plate or column through an affinity linkage for screening binding proteins or other molecules that bind to the ESP.

[0257] As further described below, the polypeptides of the present invention can readily be used as specific immunogens to raise antibodies that specifically recognize polypeptides of the present invention including ESPs and their allelic variants and homologues. The antibodies, in turn, can be used, inter alia, specifically to assay for the polypeptides of the present invention, particularly ESPs, e.g. by ELISA for detection of protein fluid samples, such as serum, by immunohistochemistry or laser scanning cytometry, for detection of protein in tissue samples, or by flow cytometry, for detection of intracellular protein in cell suspensions, for specific antibody-mediated isolation and/or purification of ESPs, as for example by immunoprecipitation, and for use as specific agonists or antagonists of ESPs.

[0258] One may determine whether polypeptides of the present invention including ESPs, muteins, homologous proteins or allelic variants or fusion proteins of the present invention are functional by methods known in the art. For instance, residues that are tolerant of change while retaining function can be identified by altering the polypeptide at known residues using methods known in the art, such as alanine scanning mutagenesis, Cunningham et al., Science 244(4908): 1081-5 (1989); transposon linker scanning mutagenesis, Chen et al., Gene 263(1-2): 39-48 (2001); combinations of homolog- and alanine-scanning mutagenesis, Jin et al., J. Mol. Biol. 226(3): 851-65 (1992); combinatorial alanine scanning, Weiss et al., Proc. Natl. Acad. Sci USA 97(16): 8950-4 (2000), followed by functional assay. Transposon linker scanning kits are available commercially (New England Biolabs, Beverly, Mass., USA, catalog. no. E7-102S; EZ::TN™ In-Frame Linker Insertion Kit, catalogue no. EZI04KN, (Epicentre Technologies Corporation, Madison, Wis., USA).

[0259] Purification of the polypeptides or fusion proteins of the present invention is well known and within the skill of one having ordinary skill in the art. See, e.g., Scopes, Protein Purification, 2d ed. (1987). Purification of recombinantly expressed polypeptides is described above. Purification of chemically-synthesized peptides can readily be effected, e.g., by HPLC.

[0260] Accordingly, it is an aspect of the present invention to provide the isolated polypeptides or fusion proteins of the present invention in pure or substantially pure form in the presence of absence of a stabilizing agent. Stabilizing agents include both proteinaceous and non-proteinaceous material and are well known in the art. Stabilizing agents, such as albumin and polyethylene glycol (PEG) are known and are commercially available.

[0261] Although high levels of purity are preferred when the isolated polypeptide or fusion protein of the present invention are used as therapeutic agents, such as in vaccines and replacement therapy, the isolated polypeptides of the present invention are also useful at lower purity. For example, partially purified polypeptides of the present invention can be used as immunogens to raise antibodies in laboratory animals.

[0262] In a preferred embodiment, the purified and substantially purified polypeptides of the present invention are in compositions that lack detectable ampholytes, acrylamide monomers, bis-acrylamide monomers, and polyacrylamide.

[0263] The polypeptides or fusion proteins of the present invention can usefully be attached to a substrate. The substrate can be porous or solid, planar or non-planar; the bond can be covalent or noncovalent. For example, the peptides of the invention may be stabilized by covalent linkage to albumin. See, U.S. Pat. No. 5,876,969, the contents of which are hereby incorporated in its entirety.

[0264] For example, the polypeptides or fusion proteins of the present invention can usefully be bound to a porous substrate, commonly a membrane, typically comprising nitrocellulose, polyvinylidene fluoride (PVDF), or cationically derivatized, hydrophilic PVDF; so bound, the polypeptides or fusion proteins of the present invention can be used to detect and quantify antibodies, e.g. in serum, that bind specifically to the immobilized polypeptide or fusion protein of the present invention.

[0265] As another example, the polypeptides or fusion proteins of the present invention can usefully be bound to a substantially nonporous substrate, such as plastic, to detect and quantify antibodies, e.g. in serum, that bind specifically to the immobilized protein of the present invention. Such plastics include polymethylacrylic, polyethylene, polypropylene, polyacrylate, polymethylmethacrylate, polyvinylchloride, polytetrafluoroethylene, polystyrene, polycarbonate, polyacetal, polysulfone, celluloseacetate, cellulosenitrate, nitrocellulose, or mixtures thereof; when the assay is performed in a standard microtiter dish, the plastic is typically polystyrene.

[0266] The polypeptides and fusion proteins of the present invention can also be attached to a substrate suitable for use as a surface enhanced laser desorption ionization source; so attached, the polypeptide or fusion protein of the present invention is useful for binding and then detecting secondary proteins that bind with sufficient affinity or avidity to the surface-bound polypeptide or fusion protein to indicate biologic interaction there between. The polypeptides or fusion proteins of the present invention can also be attached to a substrate suitable for use in surface plasmon resonance detection; so attached, the polypeptide or fusion protein of the present invention is useful for binding and then detecting secondary proteins that bind with sufficient affinity or avidity to the surface-bound polypeptide or fusion protein to indicate biological interaction there between.

Antibodies

[0267] In another aspect, the invention provides antibodies, including fragments and derivatives thereof, that bind specifically to polypeptides encoded by the nucleic acid molecules of the invention. In a preferred embodiment, the antibodies are specific for a polypeptide that is a ESP, or a fragment, mutein, derivative, analog or fusion protein thereof. In a more preferred embodiment, the antibodies are specific for a polypeptide that comprises SEQ ID NO: 420-600, or a fragment, mutein, derivative, analog or fusion protein thereof.

[0268] The antibodies of the present invention can be specific for linear epitopes, discontinuous epitopes, or conformational epitopes of such proteins or protein fragments, either as present on the protein in its native conformation or, in some cases, as present on the proteins as denatured, as, e.g., by solubilization in SDS. New epitopes may be also due to a difference in post translational modifications (PTMs) in disease versus normal tissue. For example, a particular site on a ESP may be glycosylated in cancerous cells, but not glycosylated in normal cells or vis versa. In addition, alternative splice forms of a ESP may be indicative of cancer. Differential degradation of the C or N-terminus of a ESP may also be a marker or target for anticancer therapy. For example, an ESP may be N-terminal degraded in cancer cells exposing new epitopes to which antibodies may selectively bind for diagnostic or therapeutic uses.

[0269] As is well known in the art, the degree to which an antibody can discriminate as among molecular species in a mixture will depend, in part, upon the conformational relatedness of the species in the mixture; typically, the antibodies of the present invention will discriminate over adventitious binding to non-ESP polypeptides by at least two-fold, more typically by at least 5-fold, typically by more than 10-fold, 25-fold, 50-fold, 75-fold, and often by more than 100-fold, and on occasion by more than 500-fold or 1000-fold. When used to detect the proteins or protein fragments of the present invention, the antibody of the present invention is sufficiently specific when it can be used to determine the presence of the polypeptide of the present invention in samples derived from human endometrial.

[0270] Typically, the affinity or avidity of an antibody (or antibody multimer, as in the case of an IgM pentamer) of the present invention for a protein or protein fragment of the present invention will be at least about 1×10⁻⁶ molar (M), typically at least about 5×10⁻⁷ M, 1×10⁻⁷ M, with affinities and avidities of at least 1×10⁻⁸ M, 5×10⁻⁹ M, 1×10⁻¹⁰ M and up to 1×10⁻¹³ M proving especially useful.

[0271] The antibodies of the present invention can be naturally occurring forms, such as IgG, IgM, IgD, IgE, IgY, and IgA, from any avian, reptilian, or mammalian species.

[0272] Human antibodies can, but will infrequently, be drawn directly from human donors or human cells. In such case, antibodies to the polypeptides of the present invention will typically have resulted from fortuitous immunization, such as autoimmune immunization, with the polypeptide of the present invention. Such antibodies will typically, but will not invariably, be polyclonal. In addition, individual polyclonal antibodies may be isolated and cloned to generate monoclonals.

[0273] Human antibodies are more frequently obtained using transgenic animals that express human immunoglobulin genes, which transgenic animals can be affirmatively immunized with the protein immunogen of the present invention. Human Ig-transgenic mice capable of producing human antibodies and methods of producing human antibodies therefrom upon specific immunization are described, inter alia, in U.S. Pat. Nos. 6,162,963; 6,150,584; 6,114,598; 6,075,181; 5,939,598; 5,877,397; 5,874,299; 5,814,318; 5,789,650; 5,770,429; 5,661,016; 5,633,425; 5,625,126; 5,569,825; 5,545,807; 5,545,806, and 5,591,669, the disclosures of which are incorporated herein by reference in their entireties. Such antibodies are typically monoclonal, and are typically produced using techniques developed for production of murine antibodies.

[0274] Human antibodies are particularly useful, and often preferred, when the antibodies of the present invention are to be administered to human beings as in vivo diagnostic or therapeutic agents, since recipient immune response to the administered antibody will often be substantially less than that occasioned by administration of an antibody derived from another species, such as mouse.

[0275] IgG, IgM, IgD, IgE, IgY, and IgA antibodies of the present invention are also usefully obtained from other species, including mammals such as rodents (typically mouse, but also rat, guinea pig, and hamster), lagomorphs (typically rabbits), and also larger mammals, such as sheep, goats, cows, and horses; or egg laying birds or reptiles such as chickens or alligators. In such cases, as with the transgenic human-antibody-producing non-human mammals, fortuitous immunization is not required, and the non-human mammal is typically affirmatively immunized, according to standard immunization protocols, with the polypeptide of the present invention. One form of avian antibodies may be generated using techniques described in WO 00/29444, published 25 May 2000.

[0276] As discussed above, virtually all fragments of 8 or more contiguous amino acids of a polypeptide of the present invention can be used effectively as immunogens when conjugated to a carrier, typically a protein such as bovine thyroglobulin, keyhole limpet hemocyanin, or bovine serum albumin, conveniently using a bifunctional linker such as those described elsewhere above, which discussion is incorporated by reference here.

[0277] Immunogenicity can also be conferred by fusion of the polypeptide of the present invention to other moieties. For example, polypeptides of the present invention can be produced by solid phase synthesis on a branched polylysine core matrix; these multiple antigenic peptides (MAPs) provide high purity, increased avidity, accurate chemical definition and improved safety in vaccine development. Tam et al., Proc. Natl. Acad. Sci. USA 85: 5409-5413 (1988); Posnett et al., J. Biol. Chem. 263: 1719-1725 (1988).

[0278] Protocols for immunizing non-human mammals or avian species are well-established in the art. See Harlow et al. (eds.), Using Antibodies: A Laboratory Manual, Cold Spring Harbor Laboratory (1998); Coligan et al. (eds.), Current Protocols in Immunology John Wiley & Sons, Inc. (2001); Zola, Monoclonal Antibodies: Preparation and Use of Monoclonal Antibodies and Engineered Antibody Derivatives (Basics: From Background to Bench), Springer Verlag (2000); Gross M, Speck J. Dtsch. Tierarztl. Wochenschr. 103: 417-422 (1996). Immunization protocols often include multiple immunizations, either with or without adjuvants such as Freund's complete adjuvant and Freund's incomplete adjuvant, and may include naked DNA immunization (Moss, Semin. Immunol. 2: 317-327 (1990).

[0279] Antibodies from non-human mammals and avian species can be polyclonal or monoclonal, with polyclonal antibodies having certain advantages in immunohistochemical detection of the polypeptides of the present invention and monoclonal antibodies having advantages in identifying and distinguishing particular epitopes of the polypeptides of the present invention. Antibodies from avian species may have particular advantage in detection of the polypeptides of the present invention, in human serum or tissues (Vikinge et al., Biosens. Bioelectron. 13: 1257-1262 (1998). Following immunization, the antibodies of the present invention can be obtained using any art-accepted technique. Such techniques are well known in the art and are described in detail in references such as Coligan, supra; Zola, supra; Howard et al. (eds.), Basic Methods in Antibody Production and Characterizations, CRC Press (2000); Harlow, supra; Davis (ed.), Monoclonal Antibody Protocols, Vol. 45, Humana Press (1995); Delves (ed.), Antibody Production: Essential Techniques, John Wiley & Son Ltd (1997); and Kenney, Antibody Solution: An Antibody Methods Manual, Chapman & Hall (1997).

[0280] Briefly, such techniques include, inter alia, production of monoclonal antibodies by hybridomas and expression of antibodies or fragments or derivatives thereof from host cells engineered to express immunoglobulin genes or fragments thereof. These two methods of production are not mutually exclusive: genes encoding antibodies specific for the polypeptides of the present invention can be cloned from hybridomas and thereafter expressed in other host cells. Nor need the two necessarily be performed together: e.g., genes encoding antibodies specific for the polypeptides of the present invention can be cloned directly from B cells known to be specific for the desired protein, as further described in U.S. Pat. No. 5,627,052, the disclosure of which is incorporated herein by reference in its entirety, or from antibody-displaying phage.

[0281] Recombinant expression in host cells is particularly useful when fragments or derivatives of the antibodies of the present invention are desired.

[0282] Host cells for recombinant antibody production of whole antibodies, antibody fragments, or antibody derivatives can be prokaryotic or eukaryotic.

[0283] Prokaryotic hosts are particularly useful for producing phage displayed antibodies of the present invention.

[0284] The technology of phage-displayed antibodies, in which antibody variable region fragments are fused, for example, to the gene III protein (pIII) or gene VIII protein (pVIII) for display on the surface of filamentous phage, such as M13, is by now well-established. See, e.g., Sidhu, Curr. Opin. Biotechnol. 11(6): 610-6 (2000); Griffiths et al., Curr. Opin. Biotechnol. 9(1): 102-8 (1998); Hoogenboom et al., Immunotechnology, 4(1): 1-20 (1998); Rader et al., Current Opinion in Biotechnology 8: 503-508 (1997); Aujame et al., Human Antibodies 8: 155-168 (1997); Hoogenboom, Trends in Biotechnol. 15: 62-70 (1997); de Kruif et al., 17: 453-455 (1996); Barbas et al., Trends in Biotechnol. 14: 230-234 (1996); Winter et al., Ann. Rev. Immunol. 433-455 (1994). Techniques and protocols required to generate, propagate, screen (pan), and use the antibody fragments from such libraries have recently been compiled. See, e.g., Barbas (2001), supra; Kay, supra; and Abelson, supra.

[0285] Typically, phage-displayed antibody fragments are scFv fragments or Fab fragments; when desired, full length antibodies can be produced by cloning the variable regions from the displaying phage into a complete antibody and expressing the full length antibody in a further prokaryotic or a eukaryotic host cell. Eukaryotic cells are also useful for expression of the antibodies, antibody fragments, and antibody derivatives of the present invention. For example, antibody fragments of the present invention can be produced in Pichia pastoris and in Saccharomyces cerevisiae. See, e.g. Takahashi et al., Biosci. Biotechnol. Biochem. 64(10): 2138-44 (2000); Freyre et al., J. Biotechnol. 76(2-3): 1 57-63 (2000); Fischer et al., Biotechnol. Appl. Biochem. 30 (Pt 2): 117-20 (1999); Pennell et al., Res. Immunol. 149(6): 599-603 (1998); Eldin et al., J. Immunol. Methods. 201(1): 67-75 (1997);, Frenken et al., Res. Immunol 149(6): 589-99 (1998); and Shusta et al., Nature Biotechnol. 16(8): 773-7 (1998).

[0286] Antibodies, including antibody fragments and derivatives, of the present invention can also be produced in insect cells. See, e.g., Li et al., Protein Expr. Purif: 21(1): 121-8 (2001); Ailor et al., Biotechnol. Bioeng. 58(2-3): 196-203 (1998); Hsu et al., Biotechnol. Prog. 13(1): 96-104 (1997); Edelman et al., Immunology 91(1): 13-9 (1997); and Nesbit et al., J. Immunol. Methods 151(1-2): 201-8 (1992).

[0287] Antibodies and fragments and derivatives thereof of the present invention can also be produced in plant cells, particularly maize or tobacco, Giddings et al., Nature Biotechnol. 18(11): 1151-5 (2000); Gavilondo et al., Biotechniques 29(1): 128-38 (2000); Fischer et at., J. Biol. Regul. Homeost. Agents 14(2): 83-92 (2000); Fischer et al., Biotechnol. Appl. Biochem. 30 (Pt 2): 113-6 (1999); Fischer et al., Biol. Chem. 380(7-8): 825-39 (1999); Russell, Curr. Top. Microbiol. Immunol. 240: 119-38 (1999); and Ma et al., Plant Physiol. 109(2): 341-6 (1995).

[0288] Antibodies, including antibody fragments and derivatives, of the present invention can also be produced in transgenic, non-human, mammalian milk. See, e.g. Pollock et al., J. Immunol Methods. 231: 147-57 (1999); Young et al., Res. Immunol. 149: 609-10 (1998); and Limonta et al., Immunotechnology 1: 107-13 (1995).

[0289] Mammalian cells useful for recombinant expression of antibodies, antibody fragments, and antibody derivatives of the present invention include CHO cells, COS cells, 293 cells, and myeloma cells. Verma et al., J. Immunol. Methods 216(1-2): 165-81 (1998) review and compare bacterial, yeast, insect and mammalian expression systems for expression of antibodies. Antibodies of the present invention can also be prepared by cell free translation, as further described in Merk et al., J. Biochem. (Tokyo) 125(2): 328-33 (1999) and Ryabova et al., Nature Biotechnol. 15(1): 79-84 (1997), and in the milk of transgenic animals, as further described in Pollock et al., J. Immunol. Methods 231(1-2): 147-57 (1999).

[0290] The invention further provides antibody fragments that bind specifically to one or more of the polypeptides of the present invention, to one or more of the polypeptides encoded by the isolated nucleic acid molecules of the present invention, or the binding of which can be competitively inhibited by one or more of the polypeptides of the present invention or one or more of the polypeptides encoded by the isolated nucleic acid molecules of the present invention. Among such useful fragments are Fab, Fab′, Fv, F(ab)′₂, and single chain Fv (scFv) fragments. Other useful fragments are described in Hudson, Curr. Opin. Biotechnol. 9(4): 395-402 (1998).

[0291] The present invention also relates to antibody derivatives that bind specifically to one or more of the polypeptides of the present invention, to one or more of the polypeptides encoded by the isolated nucleic acid molecules of the present invention, or the binding of which can be competitively inhibited by one or more of the polypeptides of the present invention or one or more of the polypeptides encoded by the isolated nucleic acid molecules of the present invention.

[0292] Among such useful derivatives are chimeric, primatized, and humanized antibodies; such derivatives are less immunogenic in human beings, and thus are more suitable for in vivo administration, than are unmodified antibodies from non-human mammalian species. Another useful method is PEGylation to increase the serum half life of the antibodies.

[0293] Chimeric antibodies typically include heavy and/or light chain variable regions (including both CDR and framework residues) of immunoglobulins of one species, typically mouse, fused to constant regions of another species, typically human. See, e.g., Morrison et al., Proc. Natl. Acad. Sci USA. 81(21): 6851-5 (1984); Sharon et al., Nature 309(5966): 364-7 (1984); Takeda et al., Nature 314(6010): 4524 (1985); and U.S. Pat. No. 5,807,715 the disclosure of which is incorporated herein by reference in its entirety. Primatized and humanized antibodies typically include heavy and/or light chain CDRs from a murine antibody grafted into a non-human primate or human antibody V region framework, usually further comprising a human constant region, Riechmann et al., Nature 332(6162): 323-7 (1988); Co et al., Nature 351(6326): 501-2 (1991); and U.S. Pat. Nos. 6,054,297; 5,821,337; 5,770,196; 5,766,886; 5,821,123; 5,869,619; 6,180,377; 6,013,256; 5,693,761; and 6,180,370, the disclosures of which are incorporated herein by reference in their entireties. Other useful antibody derivatives of the invention include heteromeric antibody complexes and antibody fusions, such as diabodies (bispecific antibodies), single-chain diabodies, and intrabodies.

[0294] It is contemplated that the nucleic acids encoding the antibodies of the present invention can be operably joined to other nucleic acids forming a recombinant vector for cloning or for expression of the antibodies of the invention. Accordingly, the present invention includes any recombinant vector containing the coding sequences, or part thereof, whether for eukaryotic transduction, transfection or gene therapy. Such vectors may be prepared using conventional molecular biology techniques, known to those with skill in the art, and would comprise DNA encoding sequences for the immunoglobulin V-regions including framework and CDRs or parts thereof, and a suitable promoter either with or without a signal sequence for intracellular transport. Such vectors may be transduced or transfected into eukaryotic cells or used for gene therapy (Marasco et al., Proc. Natl. Acad. Sci. (USA) 90: 7889-7893 (1993); Duan et al., Proc. Natl. Acad. Sci. (USA) 91: 5075-5079 (1994), by conventional techniques, known to those with skill in the art.

[0295] The antibodies of the present invention, including fragments and derivatives thereof, can usefully be labeled. It is, therefore, another aspect of the present invention to provide labeled antibodies that bind specifically to one or more of the polypeptides of the present invention, to one or more of the polypeptides encoded by the isolated nucleic acid molecules of the present invention, or the binding of which can be competitively inhibited by one or more of the polypeptides of the present invention or one or more of the polypeptides encoded by the isolated nucleic acid molecules of the present invention. The choice of label depends, in part, upon the desired use.

[0296] For example, when the antibodies of the present invention are used for immunohistochemical staining of tissue samples, the label can usefully be an enzyme that catalyzes production and local deposition of a detectable product. Enzymes typically conjugated to antibodies to permit their immunohistochemical visualization are well known, and include alkaline phosphatase, β-galactosidase, glucose oxidase, horseradish peroxidase (HRP), and urease. Typical substrates for production and deposition of visually detectable products include o-nitrophenyl-beta-D-galactopyranoside (ONPG); o-phenylenediamine dihydrochloride (OPD); p-nitrophenyl phosphate (PNPP); p-nitrophenyl-beta-D-galactopryanoside (PNPG); 3′,3′-diaminobenzidine (DAB); 3-amino-9-ethylcarbazole (AEC); 4-chloro-1-naphthol (CN); 5-bromo-4-chloro-3-indolyl-phosphate (BCIP); ABTS®; BluoGal; iodonitrotetrazolium (INT); nitroblue tetrazolium chloride (NBT); phenazine methosulfate (PMS); phenolphthalein monophosphate (PMP); tetramethyl benzidine (TMB); tetranitroblue, tetrazolium (TNBT); X-Gal; X-Gluc; and X-Glucoside.

[0297] Other substrates can be used to produce products for local deposition that are luminescent. For example, in the presence of hydrogen peroxide (H₂O₂), horseradish peroxidase (HRP) can catalyze the oxidation of cyclic diacylhydrazides, such as luminol. Immediately following the oxidation, the luminol is in an excited state (intermediate reaction product), which decays to the ground state by emitting light. Strong enhancement of the light emission is produced by enhancers, such as phenolic compounds. Advantages include high sensitivity, high resolution, and rapid detection without radioactivity and requiring only small amounts of antibody. See, e.g., Thorpe et al., Methods Enzymol. 133: 331-53 (1986); Kricka et al., J. Immunoassay 17(1): 67-83 (1996); and Lundqvist et al., J. Biolumin. Chemilumin. 10(6): 353-9 (1995). Kits for such enhanced chemiluminescent detection (ECL) are available commercially. The antibodies can also be labeled using colloidal gold.

[0298] As another example, when the antibodies of the present invention are used, e.g., for flow cytometric detection, for scanning laser cytometric detection, or for fluorescent immunoassay, they can usefully be labeled with fluorophores. There are a wide variety of fluorophore labels that can usefully be attached to the antibodies of the present invention. For flow cytometric applications, both for extracellular detection and for intracellular detection, common useful fluorophores can be fluorescein isothiocyanate (FITC), allophycocyanin (APC), R-phycoerythrin (PE), peridinin chlorophyll protein (PerCP), Texas Red, Cy3, Cy5, fluorescence resonance energy tandem fluorophores such as PerCP-Cy5.5, PE-Cy5, PE-Cy5.5, PE-Cy7, PE-Texas Red, and APC-Cy7.

[0299] Other fluorophores include, inter alia, Alexa Fluor® 350, Alexa Fluor® 488, Alexa Fluor® 532, Alexa Fluor® 546, Alexa Fluor® 568, Alexa Fluor® 594, Alexa Fluor® 647 (monoclonal antibody labeling kits available from Molecular Probes, Inc., Eugene, Oreg., USA), BODIPY dyes, such as BODIPY 493/503, BODIPY FL, BODIPY R6G, BODIPY 530/550, BODIPY TMR, BODIPY 558/568, BODIPY 558/568, BODIPY 564/570, BODIPY 576/589, BODIPY 581/591, BODIPY TR, BODIPY 630/650, BODIPY 650/665, Cascade Blue, Cascade Yellow, Dansyl, lissamine rhodamine B, Marina Blue, Oregon Green 488, Oregon Green 514, Pacific Blue, rhodamine 6G, rhodamine green, rhodamine red, tetramethylrhodamine, Texas Red (available from Molecular Probes, Inc., Eugene, Oreg., USA), and Cy2, Cy3, Cy3.5, Cy5, Cy5.5, Cy7, all of which are also useful for fluorescently labeling the antibodies of the present invention. For secondary detection using labeled avidin, streptavidin, captavidin or neutravidin, the antibodies of the present invention can usefully be labeled with biotin.

[0300] When the antibodies of the present invention are used, e.g., for western blotting applications, they can usefully be labeled with radioisotopes, such as ³³P, ³²P, ³⁵S, ³H, and ¹²⁵I. As another example, when the antibodies of the present invention are used for radioimmunotherapy, the label can usefully be ²²⁸Th, ²²⁷Ac, ²²⁵Ac, ²²³Ra, ²¹³Bi, ²¹²Pb, ²¹² Bi, ²¹¹At, ²⁰³Pb, ¹⁹⁴Os, ¹⁸⁸Re, ¹⁸⁶Re, ¹⁵³Sm, 149Tb, ¹³¹I, ¹²⁵I, ¹¹¹In, ¹⁰⁵Rh, ^{99m}Tc, ⁹⁷Ru, ⁹⁰Y, ⁹⁰Sr, ⁸⁸Y, ⁷²Se, ⁶⁷Cu, or ⁴⁷Sc.

[0301] As another example, when the antibodies of the present invention are to be used for in vivo diagnostic use, they can be rendered detectable by conjugation to MRI contrast agents, such as gadolinium diethylenetriaminepentaacetic acid (DTPA), Lauffer et al., Radiology 207(2): 529-38 (1998), or by radioisotopic labeling.

[0302] As would be understood, use of the labels described above is not restricted to the application as for which they were mentioned.

[0303] The antibodies of the present invention, including fragments and derivatives thereof, can also be conjugated to toxins, in order to target the toxin's ablative action to cells that display and/or express the polypeptides of the present invention. Commonly, the antibody in such immunotoxins is conjugated to Pseudomonas exotoxin A, diphtheria toxin, shiga toxin A, anthrax toxin lethal factor, or ricin. See Hall (ed.), Immunotoxin Methods and Protocols (Methods in Molecular Biology, vol. 166), Humana Press (2000); and Frankel et al. (eds.), Clinical Applications of Immunotoxins, Springer-Verlag (1998).

[0304] The antibodies of the present invention can usefully be attached to a substrate, and it is, therefore, another aspect of the invention to provide antibodies that bind specifically to one or more of the polypeptides of the present invention, to one or more of the polypeptides encoded by the isolated nucleic acid molecules of the present invention, or the binding of which can be competitively inhibited by one or more of the polypeptides of the present invention or one or more of the polypeptides encoded by the isolated nucleic acid molecules of the present invention, attached to a substrate. Substrates can be porous or nonporous, planar or nonplanar. For example, the antibodies of the present invention can usefully be conjugated to filtration media, such as NHS-activated Sepharose or CNBr-activated Sepharose for purposes of immunoaffinity chromatography. For example, the antibodies of the present invention can usefully be attached to paramagnetic microspheres, typically by biotin-streptavidin interaction, which microsphere can then be used for isolation of cells that express or display the polypeptides of the present invention. As another example, the antibodies of the present invention can usefully be attached to the surface of a microtiter plate for ELISA.

[0305] As noted above, the antibodies of the present invention can be produced in prokaryotic and eukaryotic cells. It is, therefore, another aspect of the present invention to provide cells that express the antibodies of the present invention, including hybridoma cells, B cells, plasma cells, and host cells recombinantly modified to express the antibodies of the present invention.

[0306] In yet a further aspect, the present invention provides aptamers evolved to bind specifically to one or more of the ESPs of the present invention or to polypeptides encoded by the ESNAs of the invention.

[0307] In sum, one of skill in the art, provided with the teachings of this invention, has available a variety of methods which may be used to alter the biological properties of the antibodies of this invention including methods which would increase or decrease the stability or half-life, immunogenicity, toxicity, affinity or yield of a given antibody molecule, or to alter it in any other way that may render it more suitable for a particular application.

Transgenic Animals and Cells

[0308] In another aspect, the invention provides transgenic cells and non-human organisms comprising nucleic acid molecules of the invention. In a preferred embodiment, the transgenic cells and non-human organisms comprise a nucleic acid molecule encoding a ESP. In a preferred embodiment, the ESP comprises an amino acid sequence selected from SEQ ID NO: 420-600, or a fragment, mutein, homologous protein or allelic variant thereof. In another preferred embodiment, the transgenic cells and non-human organism comprise a ESNA of the invention, preferably a ESNA comprising a nucleotide sequence selected from the group consisting of SEQ ID NO: 1-419, or a part, substantially similar nucleic acid molecule, allelic variant or hybridizing nucleic acid molecule thereof.

[0309] In another embodiment, the transgenic cells and non-human organisms have a targeted disruption or replacement of the endogenous orthologue of the human ESG. The transgenic cells can be embryonic stem cells or somatic cells. The transgenic non-human organisms can be chimeric, nonchimeric heterozygotes, and nonchimeric homozygotes. Methods of producing transgenic animals are well known in the art. See, e.g., Hogan et al., Manipulating the Mouse Embryo: A Laboratory Manual, 2d ed., Cold Spring Harbor Press (1999); Jackson et al., Mouse Genetics and Transgenics: A Practical Approach, Oxford University Press (2000); and Pinkert, Transgenic Animal Technology: A Laboratory Handbook, Academic Press (1999).

[0310] Any technique known in the art may be used to introduce a nucleic acid molecule of the invention into an animal to produce the founder lines of transgenic animals. Such techniques include, but are not limited to, pronuclear microinjection. (see, e.g., Paterson et al., Appl. Microbiol. Biotechnol. 40: 691-698 (1994); Carver et al., Biotechnology 11: 1263-1270 (1993); Wright et al., Biotechnology 9: 830-834 (1991); and U.S. Pat. No. 4,873,191, herein incorporated by reference in its entirety); retrovirus-mediated gene transfer into germ lines, blastocysts or embryos (see, e.g., Van der Putten et al., Proc. Natl. Acad. Sci., USA 82: 6148-6152 (1985)); gene targeting in embryonic stem cells (see, e.g., Thompson et al., Cell 56: 313-321 (1989)); electroporation of cells or embryos (see, e.g., Lo, 1983, Mol. Cell. Biol. 3: 1803-1814 (1983)); introduction using a gene gun (see, e.g., Ulmer et al., Science 259: 1745-49 (1993); introducing nucleic acid constructs into embryonic pleuripotent stem cells and transferring the stem cells back into the blastocyst; and sperm-mediated gene transfer (see, e.g., Lavitrano et al., Cell 57: 717-723 (1989)).

[0311] Other techniques include, for example, nuclear transfer into enucleated oocytes of nuclei from cultured embryonic, fetal, or adult cells induced to quiescence (see, e.g., Campell et al., Nature 380: 64-66 (1996); Wilmut et al., Nature 385: 810-813 (1997)). The present invention provides for transgenic animals that carry the transgene (i.e., a nucleic acid molecule of the invention) in all their cells, as well as animals which carry the transgene in some, but not all their cells, i.e. e., mosaic animals or chimeric animals.

[0312] The transgene may be integrated as a single transgene or as multiple copies, such as in concatamers, e.g., head-to-head tandems or head-to-tail tandems. The transgene may also be selectively introduced into and activated in a particular cell type by following, e.g., the teaching of Lasko et al. et al., Proc. Natl. Acad. Sci. USA 89: 6232-6236 (1992). The regulatory sequences required for such a cell-type specific activation will depend upon the particular cell type of interest, and will be apparent to those of skill in the art.

[0313] Once transgenic animals have been generated, the expression of the recombinant gene may be assayed utilizing standard techniques. Initial screening may be accomplished by Southern blot analysis or PCR techniques to analyze animal tissues to verify that integration of the transgene has taken place. The level of mRNA expression of the transgene in the tissues of the transgenic animals may also be assessed using techniques which include, but are not limited to, Northern blot analysis of tissue samples obtained from the animal, in situ hybridization analysis, and reverse transcriptase-PCR (RT-PCR). Samples of transgenic gene-expressing tissue may also be evaluated immunocytochemically or immunohistochemically using antibodies specific for the transgene product.

[0314] Once the founder animals are produced, they may be bred, inbred, outbred, or crossbred to produce colonies of the particular animal. Examples of such breeding strategies include, but are not limited to: outbreeding of founder animals with more than one integration site in order to establish separate lines; inbreeding of separate lines in order to produce compound transgenics that express the transgene at higher levels because of the effects of additive expression of each transgene; crossing of heterozygous transgenic animals to produce animals homozygous for a given integration site in order to both augment expression and eliminate the need for screening of animals by DNA analysis; crossing of separate homozygous lines to produce compound heterozygous or homozygous lines; and breeding to place the transgene on a distinct background that is appropriate for an experimental model of interest.

[0315] Transgenic animals of the invention have uses which include, but are not limited to, animal model systems useful in elaborating the biological function of polypeptides of the present invention, studying conditions and/or disorders associated with aberrant expression, and in screening for compounds effective in ameliorating such conditions and/or disorders.

[0316] Methods for creating a transgenic animal with a disruption of a targeted gene are also well known in the art. In general, a vector is designed to comprise some nucleotide sequences homologous to the endogenous targeted gene. The vector is introduced into a cell so that it may integrate, via homologous recombination with chromosomal sequences, into the endogenous gene, thereby disrupting the function of the endogenous gene. The transgene may also be selectively introduced into a particular cell type, thus inactivating the endogenous gene in only that cell type. See, e.g., Gu et al., Science 265: 103-106 (1994). The regulatory sequences required for such a cell-type specific inactivation will depend upon the particular cell type of interest, and will be apparent to those of skill in the art. See, e.g., Smithies et al., Nature 317: 230-234 (1985); Thomas et al., Cell 51: 503-512 (1987); Thompson et al., Cell 5: 313-321 (1989).

[0317] In one embodiment, a mutant, non-functional nucleic acid molecule of the invention (or a completely unrelated DNA sequence) flanked by DNA homologous to the endogenous nucleic acid sequence (either the coding regions or regulatory regions of the gene) can be used, with or without a selectable marker and/or a negative selectable marker, to transfect cells that express polypeptides of the invention in vivo. In another embodiment, techniques known in the art are used to generate knockouts in cells that contain, but do not express the gene of interest. Insertion of the DNA construct, via targeted homologous recombination, results in inactivation of the targeted gene. Such approaches are particularly suited in research and agricultural fields where modifications to embryonic stem cells can be used to generate animal offspring with an inactive targeted gene. See, e.g., Thomas, supra and Thompson, supra. However this approach can be routinely adapted for use in humans provided the recombinant DNA constructs are directly administered or targeted to the required site in vivo using appropriate viral vectors that will be apparent to those of skill in the art.

[0318] In further embodiments of the invention, cells that are genetically engineered to express the polypeptides of the invention, or alternatively, that are genetically engineered not to express the polypeptides of the invention (e.g., knockouts) are administered to a patient in vivo. Such cells may be obtained from an animal or patient or an MHC compatible donor and can include, but are not limited to fibroblasts, bone marrow cells, blood cells (e.g., lymphocytes), adipocytes, muscle cells, endothelial cells etc. The cells are genetically engineered in vitro using recombinant DNA techniques to introduce the coding sequence of polypeptides of the invention into the cells, or alternatively, to disrupt the coding sequence and/or endogenous regulatory sequence associated with the polypeptides of the invention, e.g., by transduction (using viral vectors, and preferably vectors that integrate the transgene into the cell genome) or transfection procedures, including, but not limited to, the use of plasmids, cosmids, YACs, naked DNA, electroporation, liposomes, etc.

[0319] The coding sequence of the polypeptides of the invention can be placed under the control of a strong constitutive or inducible promoter or promoter/enhancer to achieve expression, and preferably secretion, of the polypeptides of the invention. The engineered cells which express and preferably secrete the polypeptides of the invention can be introduced into the patient systemically, e.g., in the circulation, or intraperitoneally.

[0320] Alternatively, the cells can be incorporated into a matrix and implanted in the body, e.g., genetically engineered fibroblasts can be implanted as part of a skin graft; genetically engineered endothelial cells can be implanted as part of a lymphatic or vascular graft. See, e.g., U.S. Pat. Nos. 5,399,349 and 5,460,959, each of which is incorporated by reference herein in its entirety.

[0321] When the cells to be administered are non-autologous or non-MHC compatible cells, they can be administered using well known techniques which prevent the development of a host immune response against the introduced cells. For example, the cells may be introduced in an encapsulated form which, while allowing for an exchange of components with the immediate extracellular environment, does not allow the introduced cells to be recognized by the host immune system.

[0322] Transgenic and “knock-out” animals of the invention have uses which include, but are not limited to, animal model systems useful in elaborating the biological function of polypeptides of the present invention, studying conditions and/or disorders associated with aberrant expression, and in screening for compounds effective in ameliorating such conditions and/or disorders.

Computer Readable Means

[0323] A further aspect of the invention is a computer readable means for storing the nucleic acid and amino acid sequences of the instant invention. In a preferred embodiment, the invention provides a computer readable means for storing SEQ ID NO: 420-600 and SEQ ID NO: 1-419 as described herein, as the complete set of sequences or in any combination. The records of the computer readable means can be accessed for reading and display and for interface with a computer system for the application of programs allowing for the location of data upon a query for data meeting certain criteria, the comparison of sequences, the alignment or ordering of sequences meeting a set of criteria, and the like.

[0324] The nucleic acid and amino acid sequences of the invention are particularly useful as components in databases useful for search analyses as well as in sequence analysis algorithms. As used herein, the terms “nucleic acid sequences of the invention” and “amino acid sequences of the invention” mean any detectable chemical or physical characteristic of a polynucleotide or polypeptide of the invention that is or may be reduced to or stored in a computer readable form. These include, without limitation, chromatographic scan data or peak data, photographic data or scan data therefrom, and mass spectrographic data.

[0325] This invention provides computer readable media having stored thereon sequences of the invention. A computer readable medium may comprise one or more of the following: a nucleic acid sequence comprising a sequence of a nucleic acid sequence of the invention; an amino acid sequence comprising an amino acid sequence of the invention; a set of nucleic acid sequences wherein at least one of said sequences comprises the sequence of a nucleic acid sequence of the invention; a set of amino acid sequences wherein at least one of said sequences comprises the sequence of an amino acid sequence of the invention; a data set representing a nucleic acid sequence comprising the sequence of one or more nucleic acid sequences of the invention; a data set representing a nucleic acid sequence encoding an amino acid sequence comprising the sequence of an amino acid sequence of the invention; a set of nucleic acid sequences wherein at least one of said sequences comprises the sequence of a nucleic acid sequence of the invention; a set of amino acid sequences wherein at least one of said sequences comprises the sequence of an amino acid sequence of the invention; a data set representing a nucleic acid sequence comprising the sequence of a nucleic acid sequence of the invention; a data set representing a nucleic acid sequence encoding an amino acid sequence comprising the sequence of an amino acid sequence of the invention. The computer readable medium can be any composition of matter used to store information or data, including, for example, commercially available floppy disks, tapes, hard drives, compact disks, and video disks.

[0326] Also provided by the invention are methods for the analysis of character sequences, particularly genetic sequences. Preferred methods of sequence analysis include, for example, methods of sequence homology analysis, such as identity and similarity analysis, RNA structure analysis, sequence assembly, cladistic analysis, sequence motif analysis, open reading frame determination, nucleic acid base calling, and sequencing chromatogram peak analysis.

[0327] A computer-based method is provided for performing nucleic acid sequence identity or similarity identification. This method comprises the steps of providing a nucleic acid sequence comprising the sequence of a nucleic acid of the invention in a computer readable medium; and comparing said nucleic acid sequence to at least one nucleic acid or amino acid sequence to identify sequence identity or similarity.

[0328] A computer-based method is also provided for performing amino acid homology identification, said method comprising the steps of: providing an amino acid sequence comprising the sequence of an amino acid of the invention in a computer readable medium; and comparing said amino acid sequence to at least one nucleic acid or an amino acid sequence to identify homology.

[0329] A computer-based method is still further provided for assembly of overlapping nucleic acid sequences into a single nucleic acid sequence, said method comprising the steps of: providing a first nucleic acid sequence comprising the sequence of a nucleic acid of the invention in a computer readable medium; and screening for at least one overlapping region between said first nucleic acid sequence and a second nucleic acid sequence. In addition, the invention includes a method of using patterns of expression associated with either the nucleic acids or proteins in a computer-based method to diagnose disease.

Diagnostic Methods for Endometrial Cancer

[0330] The present invention also relates to quantitative and qualitative diagnostic assays and methods for detecting, diagnosing, monitoring, staging and predicting cancers by comparing expression of a ESNA or a ESP in a human patient that has or may have endometrial cancer, or who is at risk of developing endometrial cancer, with the expression of a ESNA or a ESP in a normal human control. For purposes of the present invention, “expression of a ESNA” or “ESNA expression” means the quantity of ESNA mRNA that can be measured by any method known in the art or the level of transcription that can be measured by any method known in the art in a cell, tissue, organ or whole patient. Similarly, the term “expression of a ESP” or “ESP expression” means the amount of ESP that can be measured by any method known in the art or the level of translation of a ESNA that can be measured by any method known in the art.

[0331] The present invention provides methods for diagnosing endometrial cancer in a patient, by analyzing for changes in levels of ESNA or ESP in cells, tissues, organs or bodily fluids compared with levels of ESNA or ESP in cells, tissues, organs or bodily fluids of preferably the same type from a normal human control, wherein an increase, or decrease in certain cases, in levels of a ESNA or ESP in the patient versus the normal human control is associated with the presence of endometrial cancer or with a predilection to the disease. In another preferred embodiment, the present invention provides methods for diagnosing endometrial cancer in a patient by analyzing changes in the structure of the mRNA of a ESG compared to the mRNA from a normal control. These changes include, without limitation, aberrant splicing, alterations in polyadenylation and/or alterations in 5′ nucleotide capping. In yet another preferred embodiment, the present invention provides methods for diagnosing endometrial cancer in a patient by analyzing changes in a ESP compared to a ESP from a normal patient. These changes include, e.g., alterations, including post translational modifications such as glycosylation and/or phosphorylation of the ESP or changes in the subcellular ESP localization.

[0332] For purposes of the present invention, diagnosing means that ESNA or ESP levels are used to determine the presence or absence of disease in a patient. As will be understood by those of skill in the art, measurement of other diagnostic parameters may be required for definitive diagnosis or determination of the appropriate treatment for the disease. The determination may be made by a clinician, a doctor, a testing laboratory, or a patient using an over the counter test. The patient may have symptoms of disease or may be asymptomatic. In addition, the ESNA or ESP levels of the present invention may be used as screening marker to determine whether further tests or biopsies are warranted. In addition, the ESNA or ESP levels may be used to determine the vulnerability or susceptibility to disease.

[0333] In a preferred embodiment, the expression of a ESNA is measured by determining the amount of a mRNA that encodes an amino acid sequence selected from SEQ ID NO: 420-600, a homolog, an allelic variant, or a fragment thereof. In a more preferred embodiment, the ESNA expression that is measured is the level of expression of a ESNA mRNA selected from SEQ ID NO: 1-419, or a hybridizing nucleic acid, homologous nucleic acid or allelic variant thereof, or a part of any of these nucleic acid molecules. ESNA expression may be measured by any method known in the art, such as those described supra, including measuring mRNA expression by Northern blot, quantitative or qualitative reverse transcriptase PCR (RT-PCR), microarray, dot or slot blots or in situ hybridization. See, e.g., Ausubel (1992), supra; Ausubel (1999), supra; Sambrook (1989), supra; and Sambrook (2001), supra. ESNA transcription may be measured by any method known in the art including using a reporter gene hooked up to the promoter of a ESG of interest or doing nuclear run-off assays. Alterations in mRNA structure, e.g., aberrant splicing variants, may be determined by any method known in the art, including, RT-PCR followed by sequencing or restriction analysis. As necessary, ESNA expression may be compared to a known control, such as normal endometrial nucleic acid, to detect a change in expression.

[0334] In another preferred embodiment, the expression of a ESP is measured by determining the level of a ESP having an amino acid sequence selected from the group consisting of SEQ ID NO: 420-600, a homolog, an allelic variant, or a fragment thereof. Such levels are preferably determined in at least one of cells, tissues, organs and/or bodily fluids, including determination of normal and abnormal levels. Thus, for instance, a diagnostic assay in accordance with the invention for diagnosing over- or underexpression of a ESNA or ESP compared to normal control bodily fluids, cells, or tissue samples may be used to diagnose the presence of endometrial cancer. The expression level of a ESP may be determined by any method known in the art, such as those described supra. In a preferred embodiment, the ESP expression level may be determined by radioimmunoassays, competitive-binding assays, ELISA, Western blot, FACS, immunohistochemistry, immunoprecipitation, proteomic approaches: two-dimensional gel electrophoresis (2D electrophoresis) and non-gel-based approaches such as mass spectrometry or protein interaction profiling. See, e.g, Harlow (1999), supra; Ausubel (1992), supra; and Ausubel (1999), supra. Alterations in the ESP structure may be determined by any method known in the art, including, e.g., using antibodies that specifically recognize phosphoserine, phosphothreonine or phosphotyrosine residues, two-dimensional polyacrylamide gel electrophoresis (2D PAGE) and/or chemical analysis of amino acid residues of the protein. Id.

[0335] In a preferred embodiment, a radioimmunoassay (RIA) or an ELISA is used. An antibody specific to a ESP is prepared if one is not already available. In a preferred embodiment, the antibody is a monoclonal antibody. The anti-ESP antibody is bound to a solid support and any free protein binding sites on the solid support are blocked with a protein such as bovine serum albumin. A sample of interest is incubated with the antibody on the solid support under conditions in which the ESP will bind to the anti-ESP antibody. The sample is removed, the solid support is washed to remove unbound material, and an anti-ESP antibody that is linked to a detectable reagent (a radioactive substance for RIA and an enzyme for ELISA) is added to the solid support and incubated under conditions in which binding of the ESP to the labeled antibody will occur. After binding, the unbound labeled antibody is removed by washing. For an ELISA, one or more substrates are added to produce a colored reaction product that is based upon the amount of an ESP in the sample. For an RIA, the solid support is counted for radioactive decay signals by any method known in the art. Quantitative results for both RIA and ELISA typically are obtained by reference to a standard curve.

[0336] Other methods to measure ESP levels are known in the art. For instance, a competition assay may be employed wherein an anti-ESP antibody is attached to a solid support and an allocated amount of a labeled ESP and a sample of interest are incubated with the solid support. The amount of labeled ESP attached to the solid support can be correlated to the quantity of a ESP in the sample.

[0337] Of the proteomic approaches, 2D PAGE is a well known technique. Isolation of individual proteins from a sample such as serum is accomplished using sequential separation of proteins by isoelectric point and molecular weight. Typically, polypeptides are first separated by isoelectric point (the first dimension) and then separated by size using an electric current (the second dimension). In general, the second dimension is perpendicular to the first dimension. Because no two proteins with different sequences are identical on the basis of both size and charge, the result of 2D PAGE is a roughly square gel in which each protein occupies a unique spot. Analysis of the spots with chemical or antibody probes, or subsequent protein microsequencing can reveal the relative abundance of a given protein and the identity of the proteins in the sample.

[0338] Expression levels of a ESNA can be determined by any method known in the art, including PCR and other nucleic acid methods, such as ligase chain reaction (LCR) and nucleic acid sequence based amplification (NASBA), can be used to detect malignant cells for diagnosis and monitoring of various malignancies. For example, reverse-transcriptase PCR (RT-PCR) is a powerful technique which can be used to detect the presence of a specific mRNA population in a complex mixture of thousands of other mRNA species. In RT-PCR, an mRNA species is first reverse transcribed to complementary DNA (cDNA) with use of the enzyme reverse transcriptase; the cDNA is then amplified as in a standard PCR reaction.

[0339] Hybridization to specific DNA molecules (e.g., oligonucleotides) arrayed on a solid support can be used to both detect the expression of and quantitate the level of expression of one or more ESNAs of interest. In this approach, all or a portion of one or more ESNAs is fixed to a substrate. A sample of interest, which may comprise RNA, e.g., total RNA or polyA-selected mRNA, or a complementary DNA (cDNA) copy of the RNA is incubated with the solid support under conditions in which hybridization will occur between the DNA on the solid support and the nucleic acid molecules in the sample of interest. Hybridization between the substrate-bound DNA and the nucleic acid molecules in the sample can be detected and quantitated by several means, including, without limitation, radioactive labeling or fluorescent labeling of the nucleic acid molecule or a secondary molecule designed to detect the hybrid.

[0340] The above tests can be carried out on samples derived from a variety of cells, bodily fluids and/or tissue extracts such as homogenates or solubilized tissue obtained from a patient. Tissue extracts are obtained routinely from tissue biopsy and autopsy material. Bodily fluids useful in the present invention include blood, urine, saliva or any other bodily secretion or derivative thereof. As used herein “blood” includes whole blood, plasma, serum, circulating epithelial cells, constituents, or any derivative of blood.

[0341] In addition to detection in bodily fluids, the proteins and nucleic acids of the invention are suitable to detection by cell capture technology. Whole cells may be captured by a variety methods for example magnetic separation, U.S. Pat. Nos. 5,200,084; 5,186,827; 5,108,933; 4,925,788, the disclosures of which are incorporated herein by reference in their entireties. Epithelial cells may be captured using such products as Dynabeads® or CELLection™ (Dynal Biotech, Oslo, Norway). Alternatively, fractions of blood may be captured, e.g., the buffy coat fraction (50 mm cells isolated from 5 ml of blood) containing epithelial cells. In addition, cancer cells may be captured using the techniques described in WO 00/47998, the disclosure of which is incorporated herein by reference in its entirety. Once the cells are captured or concentrated, the proteins or nucleic acids are detected by the means described in the subject application. Alternatively, nucleic acids may be captured directly from blood samples, see U.S. Pat. Nos. 6,156,504, 5,501,963; or WO 01/42504, the disclosures of which are incorporated herein by reference in their entireties.

[0342] In a preferred embodiment, the specimen tested for expression of ESNA or ESP includes without limitation endometrial tissue, endometrial cells grown in cell culture, blood, serum, lymph node tissue, and lymphatic fluid. In another preferred embodiment, especially when metastasis of a primary endometrial cancer is known or suspected, specimens include, without limitation, tissues from brain, bone, bone marrow, liver, lungs, colon, and adrenal glands. In general, the tissues may be sampled by biopsy, including, without limitation, needle biopsy, e.g., transthoracic needle aspiration, cervical mediatinoscopy, endoscopic lymph node biopsy, video-assisted thoracoscopy, exploratory thoracotomy, bone marrow biopsy and bone marrow aspiration.

[0343] All the methods of the present invention may optionally include determining the expression levels of one or more other cancer markers in addition to determining the expression level of a ESNA or ESP. In many cases, the use of another cancer marker will decrease the likelihood of false positives or false negatives. In one embodiment, the one or more other cancer markers include other ESNA or ESPs as disclosed herein. Other cancer markers useful in the present invention will depend on the cancer being tested and are known to those of skill in the art. In a preferred embodiment, at least one other cancer marker in addition to a particular ESNA or ESP is measured. In a more preferred embodiment, at least two other additional cancer markers are used. In an even more preferred embodiment, at least three, more preferably at least five, even more preferably at least ten additional cancer markers are used.

[0344] Diagnosing

[0345] In one aspect, the invention provides a method for determining the expression levels and/or structural alterations of one or more ESNA and/or ESP in a sample from a patient suspected of having endometrial cancer. In general, the method comprises the steps of obtaining the sample from the patient, determining the expression level or structural alterations of a ESNA and/or ESP and then ascertaining whether the patient has endometrial cancer from the expression level of the ESNA or ESP. In general, if high expression relative to a control of a ESNA or ESP is indicative of endometrial cancer, a diagnostic assay is considered positive if the level of expression of the ESNA or ESP is at least one and a half times higher, and more preferably are at least two times higher, still more preferably five times higher, even more preferably at least ten times higher, than in preferably the same cells, tissues or bodily fluid of a normal human control. In contrast, if low expression relative to a control of a ESNA or ESP is indicative of endometrial cancer, a diagnostic assay is considered positive if the level of expression of the ESNA or ESP is at least one and a half times lower, and more preferably are at least two times lower, still more preferably five times lower, even more preferably at least ten times lower than in preferably the same cells, tissues or bodily fluid of a normal human control. The normal human control may be from a different patient or from uninvolved tissue of the same patient.

[0346] The present invention also provides a method of determining whether endometrial cancer has metastasized in a patient. One may identify whether the endometrial cancer has metastasized by measuring the expression levels and/or structural alterations of one or more ESNAs and/or ESPs in a variety of tissues. The presence of a ESNA or ESP in a certain tissue at levels higher than that of corresponding noncancerous tissue (e.g., the same tissue from another individual) is indicative of metastasis if high level expression of a ESNA or ESP is associated with endometrial cancer. Similarly, the presence of a ESNA or ESP in a tissue at levels lower than that of corresponding noncancerous tissue is indicative of metastasis if low level expression of a ESNA or ESP is associated with endometrial cancer. Further, the presence of a structurally altered ESNA or ESP that is associated with endometrial cancer is also indicative of metastasis.

[0347] In general, if high expression relative to a control of a ESNA or ESP is indicative of metastasis, an assay for metastasis is considered positive if the level of expression of the ESNA or ESP is at least one and a half times higher, and more preferably are at least two times higher, still more preferably five times higher, even more preferably at least ten times higher, than in preferably the same cells, tissues or bodily fluid of a normal human control. In contrast, if low expression relative to a control of a ESNA or ESP is indicative of metastasis, an assay for metastasis is considered positive if the level of expression of the ESNA or ESP is at least one and a half times lower, and more preferably are at least two times lower, still more preferably five times lower, even more preferably at least ten times lower than in preferably the same cells, tissues or bodily fluid of a normal human control.

[0348] Staging

[0349] The invention also provides a method of staging endometrial cancer in a human patient. The method comprises identifying a human patient having endometrial cancer and analyzing cells, tissues or bodily fluids from such human patient for expression levels and/or structural alterations of one or more ESNAs or ESPs. First, one or more tumors from a variety of patients are staged according to procedures well known in the art, and the expression levels of one or more ESNAs or ESPs is determined for each stage to obtain a standard expression level for each ESNA and ESP. Then, the ESNA or ESP expression levels of the ESNA or ESP are determined in a biological sample from a patient whose stage of cancer is not known. The ESNA or ESP expression levels from the patient are then compared to the standard expression level. By comparing the expression level of the ESNAs and ESPs from the patient to the standard expression levels, one may determine the stage of the tumor. The same procedure may be followed using structural alterations of a ESNA or ESP to determine the stage of a endometrial cancer.

[0350] Monitoring

[0351] Further provided is a method of monitoring endometrial cancer in a human patient. One may monitor a human patient to determine whether there has been metastasis and, if there has been, when metastasis began to occur. One may also monitor a human patient to determine whether a preneoplastic lesion has become cancerous. One may also monitor a human patient to determine whether a therapy, e.g., chemotherapy, radiotherapy or surgery, has decreased or eliminated the endometrial cancer. The monitoring may determine if there has been a reoccurrence and, if so, determine its nature. The method comprises identifying a human patient that one wants to monitor for endometrial cancer, periodically analyzing cells, tissues or bodily fluids from such human patient for expression levels of one or more ESNAs or ESPs, and comparing the ESNA or ESP levels over time to those ESNA or ESP expression levels obtained previously. Patients may also be monitored by measuring one or more structural alterations in a ESNA or ESP that are associated with endometrial cancer.

[0352] If increased expression of a ESNA or ESP is associated with metastasis, treatment failure, or conversion of a preneoplastic lesion to a cancerous lesion, then detecting an increase in the expression level of a ESNA or ESP indicates that the tumor is metastasizing, that treatment has failed or that the lesion is cancerous, respectively. One having ordinary skill in the art would recognize that if this were the case, then a decreased expression level would be indicative of no metastasis, effective therapy or failure to progress to a neoplastic lesion. If decreased expression of a ESNA or ESP is associated with metastasis, treatment failure, or conversion of a preneoplastic lesion to a cancerous lesion, then detecting a decrease in the expression level of a ESNA or ESP indicates that the tumor is metastasizing, that treatment has failed or that the lesion is cancerous, respectively. In a preferred embodiment, the levels of ESNAs or ESPs are determined from the same cell type, tissue or bodily fluid as prior patient samples. Monitoring a patient for onset of endometrial cancer metastasis is periodic and preferably is done on a quarterly basis, but may be done more or less frequently.

[0353] The methods described herein can further be utilized as prognostic assays to identify subjects having or at risk of developing a disease or disorder associated with increased or decreased expression levels of a ESNA and/or ESP. The present invention provides a method in which a test sample is obtained from a human patient and one or more ESNAs and/or ESPs are detected. The presence of higher (or lower) ESNA or ESP levels as compared to normal human controls is diagnostic for the human patient being at risk for developing cancer, particularly endometrial cancer. The effectiveness of therapeutic agents to decrease (or increase) expression or activity of one or more ESNAs and/or ESPs of the invention can also be monitored by analyzing levels of expression of the ESNAs and/or ESPs in a human patient in clinical trials or in in vitro screening assays such as in human cells. In this way, the gene expression pattern can serve as a marker, indicative of the physiological response of the human patient or cells, as the case may be, to the agent being tested.

[0354] Detection of Genetic Lesions or Mutations

[0355] The methods of the present invention can also be used to detect genetic lesions or mutations in a ESG, thereby determining if a human with the genetic lesion is susceptible to developing endometrial cancer or to determine what genetic lesions are responsible, or are partly responsible, for a person's existing endometrial cancer. Genetic lesions can be detected, for example, by ascertaining the existence of a deletion, insertion and/or substitution of one or more nucleotides from the ESGs of this invention, a chromosomal rearrangement of a ESG, an aberrant modification of a ESG (such as of the methylation pattern of the genomic DNA), or allelic loss of a ESG. Methods to detect such lesions in the ESG of this invention are known to those having ordinary skill in the art following the teachings of the specification.

Methods of Detecting Noncancerous Endometrial Diseases

[0356] The present invention also provides methods for determining the expression levels and/or structural alterations of one or more ESNAs and/or ESPs in a sample from a patient suspected of having or known to have a noncancerous endometrial disease. In general, the method comprises the steps of obtaining a sample from the patient, determining the expression level or structural alterations of a ESNA and/or ESP, comparing the expression level or structural alteration of the ESNA or ESP to a normal endometrial control, and then ascertaining whether the patient has a noncancerous endometrial disease. In general, if high expression relative to a control of a ESNA or ESP is indicative of a particular noncancerous endometrial disease, a diagnostic assay is considered positive if the level of expression of the ESNA or ESP is at least two times higher, and more preferably are at least five times higher, even more preferably at least ten times higher, than in preferably the same cells, tissues or bodily fluid of a normal human control. In contrast, if low expression relative to a control of a ESNA or ESP is indicative of a noncancerous endometrial disease, a diagnostic assay is considered positive if the level of expression of the ESNA or ESP is at least two times lower, more preferably are at least five times lower, even more preferably at least ten times lower than in preferably the same cells, tissues or bodily fluid of a normal human control. The normal human control may be from a different patient or from uninvolved tissue of the same patient.

[0357] One having ordinary skill in the art may determine whether a ESNA and/or ESP is associated with a particular noncancerous endometrial disease by obtaining endometrial tissue from a patient having a noncancerous endometrial disease of interest and determining which ESNAs and/or ESPs are expressed in the tissue at either a higher or a lower level than in normal endometrial tissue. In another embodiment, one may determine whether a ESNA or ESP exhibits structural alterations in a particular noncancerous endometrial disease state by obtaining endometrial tissue from a patient having a noncancerous endometrial disease of interest and determining the structural alterations in one or more ESNAs and/or ESPs relative to normal endometrial tissue.

Methods for Identifying Endometrial Tissue

[0358] In another aspect, the invention provides methods for identifying endometrial tissue. These methods are particularly useful in, e.g., forensic science, endometrial cell differentiation and development, and in tissue engineering.

[0359] In one embodiment, the invention provides a method for determining whether a sample is endometrial tissue or has endometrial tissue-like characteristics. The method comprises the steps of providing a sample suspected of comprising endometrial tissue or having endometrial tissue-like characteristics, determining whether the sample expresses one or more ESNAs and/or ESPs, and, if the sample expresses one or more ESNAs and/or ESPs, concluding that the sample comprises endometrial tissue. In a preferred embodiment, the ESNA encodes a polypeptide having an amino acid sequence selected from SEQ ID NO: 420-600, or a homolog, allelic variant or fragment thereof. In a more preferred embodiment, the ESNA has a nucleotide sequence selected from SEQ ID NO: 1-419, or a hybridizing nucleic acid, an allelic variant or a part thereof. Determining whether a sample expresses a ESNA can be accomplished by any method known in the art. Preferred methods include hybridization to microarrays, Northern blot hybridization, and quantitative or qualitative RT-PCR. In another preferred embodiment, the method can be practiced by determining whether a ESP is expressed. Determining whether a sample expresses a ESP can be accomplished by any method known in the art. Preferred methods include Western blot, ELISA, RIA and 2D PAGE. In one embodiment, the ESP has an amino acid sequence selected from SEQ ID NO: 420-600, or a homolog, allelic variant or fragment thereof. In another preferred embodiment, the expression of at least two ESNAs and/or ESPs is determined. In a more preferred embodiment, the expression of at least three, more preferably four and even more preferably five ESNAs and/or ESPs are determined.

[0360] In one embodiment, the method can be used to determine whether an unknown tissue is endometrial tissue. This is particularly useful in forensic science, in which small, damaged pieces of tissues that are not identifiable by microscopic or other means are recovered from a crime or accident scene. In another embodiment, the method can be used to determine whether a tissue is differentiating or developing into endometrial tissue. This is important in monitoring the effects of the addition of various agents to cell or tissue culture, e.g., in producing new endometrial tissue by tissue engineering. These agents include, e.g., growth and differentiation factors, extracellular matrix proteins and culture medium. Other factors that may be measured for effects on tissue development and differentiation include gene transfer into the cells or tissues, alterations in pH, aqueous:air interface and various other culture conditions.

Methods for Producing and Modifying Endometrial Tissue

[0361] In another aspect, the invention provides methods for producing engineered endometrial tissue or cells. In one embodiment, the method comprises the steps of providing cells, introducing a ESNA or a ESG into the cells, and growing the cells under conditions in which they exhibit one or more properties of endometrial tissue cells. In a preferred embodiment, the cells are pleuripotent. As is well known in the art, normal endometrial tissue comprises a large number of different cell types. Thus, in one embodiment, the engineered endometrial tissue or cells comprises one of these cell types. In another embodiment, the engineered endometrial tissue or cells comprises more than one endometrial cell type. Further, the culture conditions of the cells or tissue may require manipulation in order to achieve full differentiation and development of the endometrial cell tissue. Methods for manipulating culture conditions are well known in the art.

[0362] Nucleic acid molecules encoding one or more ESPs are introduced into cells, preferably pleuripotent cells. In a preferred embodiment, the nucleic acid molecules encode ESPs having amino acid sequences selected from SEQ ID NO: 420-600, or homologous proteins, analogs, allelic variants or fragments thereof. In a more preferred embodiment, the nucleic acid molecules have a nucleotide sequence selected from SEQ ID NO: 1-419, or hybridizing nucleic acids, allelic variants or parts thereof. In another highly preferred embodiment, a ESG is introduced into the cells. Expression vectors and methods of introducing nucleic acid molecules into cells are well known in the art and are described in detail, supra.

[0363] Artificial endometrial tissue may be used to treat patients who have lost some or all of their endometrial function.

Pharmaceutical Compositions

[0364] In another aspect, the invention provides pharmaceutical compositions comprising the nucleic acid molecules, polypeptides, fusion proteins, antibodies, antibody derivatives, antibody fragments, agonists, antagonists, or inhibitors of the present invention. In a preferred embodiment, the pharmaceutical composition comprises a ESNA or part thereof. In a more preferred embodiment, the ESNA has a nucleotide sequence selected from the group consisting of SEQ ID NO: 1-419, a nucleic acid that hybridizes thereto, an allelic variant thereof, or a nucleic acid that has substantial sequence identity thereto. In another preferred embodiment, the pharmaceutical composition comprises a ESP or fragment thereof. In a more preferred embodiment, the pharmaceutical composition comprises a ESP having an amino acid sequence that is selected from the group consisting of SEQ ID NO: 420-600, a polypeptide that is homologous thereto, a fusion protein comprising all or a portion of the polypeptide, or an analog or derivative thereof. In another preferred embodiment, the pharmaceutical composition comprises an anti-ESP antibody, preferably an antibody that specifically binds to a ESP having an amino acid that is selected from the group consisting of SEQ ID NO: 420-600, or an antibody that binds to a polypeptide that is homologous thereto, a fusion protein comprising all or a portion of the polypeptide, or an analog or derivative thereof.

[0365] Such a composition typically contains from about 0.1 to 90% by weight of a therapeutic agent of the invention formulated in and/or with a pharmaceutically acceptable carrier or excipient.

[0366] Pharmaceutical formulation is a well-established art that is further described in Gennaro (ed.), Remington: The Science and Practice of Pharmacy, 20th ed., Lippincott, Williams & Wilkins (2000); Ansel et al., Pharmaceutical Dosage Forms and Drug Delivery Systems, 7^{th} ed., Lippincott Williams & Wilkins (1999); and Kibbe (ed.), Handbook of Pharmaceutical Excipients American Pharmaceutical Association, 3^{rd} ed. (2000) and thus need not be described in detail herein.

[0367] Briefly, formulation of the pharmaceutical compositions of the present invention will depend upon the route chosen for administration. The pharmaceutical compositions utilized in this invention can be administered by various routes including both enteral and parenteral routes, including oral, intravenous, intramuscular, subcutaneous, inhalation, topical, sublingual, rectal, intra-arterial, intramedullary, intrathecal, intraventricular, transmucosal, transdermal, intranasal, intraperitoneal, intrapulmonary, and intrauterine.

[0368] Oral dosage forms can be formulated as tablets, pills, dragees, capsules, liquids, gels, syrups, slurries, suspensions, and the like, for ingestion by the patient.

[0369] Solid formulations of the compositions for oral administration can contain suitable carriers or excipients, such as carbohydrate or protein fillers, such as sugars, including lactose, sucrose, mannitol, or sorbitol; starch from corn, wheat, rice, potato, or other plants; cellulose, such as methyl cellulose, hydroxypropylmethyl-cellulose, sodium carboxymethylcellulose, or microcrystalline cellulose; gums including arabic and tragacanth; proteins such as gelatin and collagen; inorganics, such as kaolin, calcium carbonate, dicalcium phosphate, sodium chloride; and other agents such as acacia and alginic acid.

[0370] Agents that facilitate disintegration and/or solubilization can be added, such as the cross-linked polyvinyl pyrrolidone, agar, alginic acid, or a salt thereof, such as sodium alginate, microcrystalline cellulose, cornstarch, sodium starch glycolate, and alginic acid.

[0371] Tablet binders that can be used include acacia, methylcellulose, sodium carboxymethylcellulose, polyvinylpyrrolidone (Povidone™), hydroxypropyl methylcellulose, sucrose, starch and ethylcellulose.

[0372] Lubricants that can be used include magnesium stearates, stearic acid, silicone fluid, talc, waxes, oils, and colloidal silica.

[0373] Fillers, agents that facilitate disintegration and/or solubilization, tablet binders and lubricants, including the aforementioned, can be used singly or in combination.

[0374] Solid oral dosage forms need not be uniform throughout. For example, dragee cores can be used in conjunction with suitable coatings, such as concentrated sugar solutions, which can also contain gum arabic, talc, polyvinylpyrrolidone, carbopol gel, polyethylene glycol, and/or titanium dioxide, lacquer solutions, and suitable organic solvents or solvent mixtures.

[0375] Oral dosage forms of the present invention include push-fit capsules made of gelatin, as well as soft, sealed capsules made of gelatin and a coating, such as glycerol or sorbitol. Push-fit capsules can contain active ingredients mixed with a filler or binders, such as lactose or starches, lubricants, such as talc or magnesium stearate, and, optionally, stabilizers. In soft capsules, the active compounds can be dissolved or suspended in suitable liquids, such as fatty oils, liquid, or liquid polyethylene glycol with or without stabilizers.

[0376] Additionally, dyestuffs or pigments can be added to the tablets or dragee coatings for product identification or to characterize the quantity of active compound, i.e., dosage.

[0377] Liquid formulations of the pharmaceutical compositions for oral (enteral) administration are prepared in water or other aqueous vehicles and can contain various suspending agents such as methylcellulose, alginates, tragacanth, pectin, kelgin, carrageenan, acacia, polyvinylpyrrolidone, and polyvinyl alcohol. The liquid formulations can also include solutions, emulsions, syrups and elixirs containing, together with the active compound(s), wetting agents, sweeteners, and coloring and flavoring agents.

[0378] The pharmaceutical compositions of the present invention can also be formulated for parenteral administration. Formulations for parenteral administration can be in the form of aqueous or non-aqueous isotonic sterile injection solutions or suspensions.

[0379] For intravenous injection, water soluble versions of the compounds of the present invention are formulated in, or if provided as a lyophilate, mixed with, a physiologically acceptable fluid vehicle, such as 5% dextrose (“D5”), physiologically buffered saline, 0.9% saline, Hanks' solution, or Ringer's solution. Intravenous formulations may include carriers, excipients or stabilizers including, without limitation, calcium, human serum albumin, citrate, acetate, calcium chloride, carbonate, and other salts.

[0380] Intramuscular preparations, e.g. a sterile formulation of a suitable soluble salt form of the compounds of the present invention, can be dissolved and administered in a pharmaceutical excipient such as Water-for-Injection, 0.9% saline, or 5% glucose solution. Alternatively, a suitable insoluble form of the compound can be prepared and administered as a suspension in an aqueous base or a pharmaceutically acceptable oil base, such as an ester of a long chain fatty acid (e.g., ethyl oleate), fatty oils such as sesame oil, triglycerides, or liposomes.

[0381] Parenteral formulations of the compositions can contain various carriers such as vegetable oils, dimethylacetamide, dimethylformamide, ethyl lactate, ethyl carbonate, isopropyl myristate, ethanol, polyols (glycerol, propylene glycol, liquid polyethylene glycol, and the like).

[0382] Aqueous injection suspensions can also contain substances that increase the viscosity of the suspension, such as sodium carboxymethyl cellulose, sorbitol, or dextran. Non-lipid polycationic amino polymers can also be used for delivery. Optionally, the suspension can also contain suitable stabilizers or agents that increase the solubility of the compounds to allow for the preparation of highly concentrated solutions.

[0383] Pharmaceutical compositions of the present invention can also be formulated to permit injectable, long-term, deposition. Injectable depot forms may be made by forming microencapsulated matrices of the compound in biodegradable polymers such as polylactide-polyglycolide. Depending upon the ratio of drug to polymer and the nature of the particular polymer employed, the rate of drug release can be controlled. Examples of other biodegradable polymers include poly(orthoesters) and poly(anhydrides). Depot injectable formulations are also prepared by entrapping the drug in microemulsions that are compatible with body tissues.

[0384] The pharmaceutical compositions of the present invention can be administered topically. For topical use the compounds of the present invention can also be prepared in suitable forms to be applied to the skin, or mucus membranes of the nose and throat, and can take the form of lotions, creams, ointments, liquid sprays or inhalants, drops, tinctures, lozenges, or throat paints. Such topical formulations further can include chemical compounds such as dimethylsulfoxide (DMSO) to facilitate surface penetration of the active ingredient. In other transdermal formulations, typically in patch-delivered formulations, the pharmaceutically active compound is formulated with one or more skin penetrants, such as 2-N-methyl-pyrrolidone (NMP) or Azone. A topical semi-solid ointment formulation typically contains a concentration of the active ingredient from about 1 to 20%, e.g., 5 to 10%, in a carrier such as a pharmaceutical cream base.

[0385] For application to the eyes or ears, the compounds of the present invention can be presented in liquid or semi-liquid form formulated in hydrophobic or hydrophilic bases as ointments, creams, lotions, paints or powders.

[0386] For rectal administration the compounds of the present invention can be administered in the form of suppositories admixed with conventional carriers such as cocoa butter, wax or other glyceride.

[0387] Inhalation formulations can also readily be formulated. For inhalation, various powder and liquid formulations can be prepared. For aerosol preparations, a sterile formulation of the compound or salt form of the compound may be used in inhalers, such as metered dose inhalers, and nebulizers. Aerosolized forms may be especially useful for treating respiratory disorders.

[0388] Alternatively, the compounds of the present invention can be in powder form for reconstitution in the appropriate pharmaceutically acceptable carrier at the time of delivery.

[0389] The pharmaceutically active compound in the pharmaceutical compositions of the present invention can be provided as the salt of a variety of acids, including but not limited to hydrochloric, sulfuric, acetic, lactic, tartaric, malic, and succinic acid. Salts tend to be more soluble in aqueous or other protonic solvents than are the corresponding free base forms.

[0390] After pharmaceutical compositions have been prepared, they are packaged in an appropriate container and labeled for treatment of an indicated condition.

[0391] The active compound will be present in an amount effective to achieve the intended purpose. The determination of an effective dose is well within the capability of those skilled in the art.

[0392] A “therapeutically effective dose” refers to that amount of active ingredient, for example ESP polypeptide, fusion protein, or fragments thereof, antibodies specific for ESP, agonists, antagonists or inhibitors of ESP, which ameliorates the signs or symptoms of the disease or prevent progression thereof; as would be understood in the medical arts, cure, although desired, is not required.

[0393] The therapeutically effective dose of the pharmaceutical agents of the present invention can be estimated initially by in vitro tests, such as cell culture assays, followed by assay in model animals, usually mice, rats, rabbits, dogs, or pigs. The animal model can also be used to determine an initial preferred concentration range and route of administration.

[0394] For example, the ED50 (the dose therapeutically effective in 50% of the population) and LD50 (the dose lethal to 50% of the population) can be determined in one or more cell culture of animal model systems. The dose ratio of toxic to therapeutic effects is the therapeutic index, which can be expressed as LD50/ED50. Pharmaceutical compositions that exhibit large therapeutic indices are preferred.

[0395] The data obtained from cell culture assays and animal studies are used in formulating an initial dosage range for human use, and preferably provide a range of circulating concentrations that includes the ED50 with little or no toxicity. After administration, or between successive administrations, the circulating concentration of active agent varies within this range depending upon pharmacokinetic factors well known in the art, such as the dosage form employed, sensitivity of the patient, and the route of administration.

[0396] The exact dosage will be determined by the practitioner, in light of factors specific to the subject requiring treatment. Factors that can be taken into account by the practitioner include the severity of the disease state, general health of the subject, age, weight, gender of the subject, diet, time and frequency of administration, drug combination(s), reaction sensitivities, and tolerance/response to therapy. Long-acting pharmaceutical compositions can be administered every 3 to 4 days, every week, or once every two weeks depending on half-life and clearance rate of the particular formulation.

[0397] Normal dosage amounts may vary from 0.1 to 100,000 micrograms, up to a total dose of about 1 g, depending upon the route of administration. Where the therapeutic agent is a protein or antibody of the present invention, the therapeutic protein or antibody agent typically is administered at a daily dosage of 0.01 mg to 30 mg/kg of body weight of the patient (e.g., 1 mg/kg to 5 mg/kg). The pharmaceutical formulation can be administered in multiple doses per day, if desired, to achieve the total desired daily dose.

[0398] Guidance as to particular dosages and methods of delivery is provided in the literature and generally available to practitioners in the art. Those skilled in the art will employ different formulations for nucleotides than for proteins or their inhibitors. Similarly, delivery of polynucleotides or polypeptides will be specific to particular cells, conditions, locations, etc.

[0399] Conventional methods, known to those of ordinary skill in the art of medicine, can be used to administer the pharmaceutical formulation(s) of the present invention to the patient. The pharmaceutical compositions of the present invention can be administered alone, or in combination with other therapeutic agents or interventions.

Therapeutic Methods

[0400] The present invention further provides methods of treating subjects having defects in a gene of the invention, e.g., in expression, activity, distribution, localization, and/or solubility, which can manifest as a disorder of endometrial function. As used herein, “treating” includes all medically-acceptable types of therapeutic intervention, including palliation and prophylaxis (prevention) of disease. The term “treating” encompasses any improvement of a disease, including minor improvements. These methods are discussed below.

[0401] Gene Therapy and Vaccines

[0402] The isolated nucleic acids of the present invention can also be used to drive in vivo expression of the polypeptides of the present invention. In vivo expression can be driven from a vector, typically a viral vector, often a vector based upon a replication incompetent retrovirus, an adenovirus, or an adeno-associated virus (AAV), for the purpose of gene therapy. In vivo expression can also be driven from signals endogenous to the nucleic acid or from a vector, often a plasmid vector, such as pVAX1 (Invitrogen, Carlsbad, Calif., USA), for purpose of “naked” nucleic acid vaccination, as further described in U.S. Pat. Nos. 5,589,466; 5,679,647; 5,804,566; 5,830,877; 5,843,913; 5,880,104; 5,958,891; 5,985,847; 6,017,897; 6,110,898; 6,204,250, the disclosures of which are incorporated herein by reference in their entireties. For cancer therapy, it is preferred that the vector also be tumor-selective. See, e.g., Doronin et al., J. Virol. 75: 3314-24 (2001).

[0403] In another embodiment of the therapeutic methods of the present invention, a therapeutically effective amount of a pharmaceutical composition comprising a nucleic acid molecule of the present invention is administered. The nucleic acid molecule can be delivered in a vector that drives expression of a ESP, fusion protein, or fragment thereof, or without such vector. Nucleic acid compositions that can drive expression of a ESP are administered, for example, to complement a deficiency in the native ESP, or as DNA vaccines. Expression vectors derived from virus, replication deficient retroviruses, adenovirus, adeno-associated (AAV) virus, herpes virus, or vaccinia virus can be used as can plasmids. See, e.g., Cid-Arregui, supra. In a preferred embodiment, the nucleic acid molecule encodes a ESP having the amino acid sequence of SEQ ID NO: 420-600, or a fragment, fusion protein, allelic variant or homolog thereof.

[0404] In still other therapeutic methods of the present invention, pharmaceutical compositions comprising host cells that express a ESP, fusions, or fragments thereof can be administered. In such cases, the cells are typically autologous, so as to circumvent xenogeneic or allotypic rejection, and are administered to complement defects in ESP production or activity. In a preferred embodiment, the nucleic acid molecules in the cells encode a ESP having the amino acid sequence of SEQ ID NO: 420-600, or a fragment, fusion protein, allelic variant or homolog thereof.

[0405] Antisense Administration

[0406] Antisense nucleic acid compositions, or vectors that drive expression of a ESG antisense nucleic acid, are administered to downregulate transcription and/or translation of a ESG in circumstances in which excessive production, or production of aberrant protein, is the pathophysiologic basis of disease.

[0407] Antisense compositions useful in therapy can have a sequence that is complementary to coding or to noncoding regions of a ESG. For example, oligonucleotides derived from the transcription initiation site, e.g., between positions −10 and +10 from the start site, are preferred.

[0408] Catalytic antisense compositions, such as ribozymes, that are capable of sequence-specific hybridization to ESG transcripts, are also useful in therapy. See, e.g., Phylactou, Adv. Drug Deliv. Rev. 44(2-3): 97-108 (2000); Phylactou et al., Hum. Mol. Genet. 7(10): 1649-53 (1998); Rossi, Ciba Found. Symp. 209: 195-204 (1997); and Sigurdsson et al., Trends Biotechnol. 13(8): 286-9 (1995).

[0409] Other nucleic acids useful in the therapeutic methods of the present invention are those that are capable of triplex helix formation in or near the ESG genomic locus. Such triplexing oligonucleotides are able to inhibit transcription. See, e.g., Intody et al., Nucleic Acids Res. 28(21): 4283-90 (2000); and McGuffie et al., Cancer Res. 60(14): 3790-9 (2000). Pharmaceutical compositions comprising such triplex forming oligos (TFOs) are administered in circumstances in which excessive production, or production of aberrant protein, is a pathophysiologic basis of disease.

[0410] In a preferred embodiment, the antisense molecule is derived from a nucleic acid molecule encoding a ESP, preferably a ESP comprising an amino acid sequence of SEQ ID NO: 420-600, or a fragment, allelic variant or homolog thereof. In a more preferred embodiment, the antisense molecule is derived from a nucleic acid molecule having a nucleotide sequence of SEQ ID NO: 1-419, or a part, allelic variant, substantially similar or hybridizing nucleic acid thereof.

[0411] Polypeptide Administration

[0412] In one embodiment of the therapeutic methods of the present invention, a therapeutically effective amount of a pharmaceutical composition comprising a ESP, a fusion protein, fragment, analog or derivative thereof is administered to a subject with a clinically-significant ESP defect.

[0413] Protein compositions are administered, for example, to complement a deficiency in native ESP. In other embodiments, protein compositions are administered as a vaccine to elicit a humoral and/or cellular immune response to ESP. The immune response can be used to modulate activity of ESP or, depending on the immunogen, to immunize against aberrant or aberrantly expressed forms, such as mutant or inappropriately expressed isoforms. In yet other embodiments, protein fusions having a toxic moiety are administered to ablate cells that aberrantly accumulate ESP.

[0414] In a preferred embodiment, the polypeptide administered is a ESP comprising an amino acid sequence of SEQ ID NO: 420-600, or a fusion protein, allelic variant, homolog, analog or derivative thereof. In a more preferred embodiment, the polypeptide is encoded by a nucleic acid molecule having a nucleotide sequence of SEQ ID NO: 1-419, or a part, allelic variant, substantially similar or hybridizing nucleic acid thereof.

[0415] Antibody, Agonist and Antagonist Administration

[0416] In another embodiment of the therapeutic methods of the present invention, a therapeutically effective amount of a pharmaceutical composition comprising an antibody (including fragment or derivative thereof) of the present invention is administered. As is well known, antibody compositions are administered, for example, to antagonize activity of ESP, or to target therapeutic agents to sites of ESP presence and/or accumulation. In a preferred embodiment, the antibody specifically binds to a ESP comprising an amino acid sequence of SEQ ID NO: 420-600, or a fusion protein, allelic variant, homolog, analog or derivative thereof. In a more preferred embodiment, the antibody specifically binds to a ESP encoded by a nucleic acid molecule having a nucleotide sequence of SEQ ID NO: 1-419, or a part, allelic variant, substantially similar or hybridizing nucleic acid thereof.

[0417] The present invention also provides methods for identifying modulators which bind to a ESP or have a modulatory effect on the expression or activity of a ESP. Modulators which decrease the expression or activity of ESP (antagonists) are believed to be useful in treating endometrial cancer. Such screening assays are known to those of skill in the art and include, without limitation, cell-based assays and cell-free assays. Small molecules predicted via computer imaging to specifically bind to regions of a ESP can also be designed, synthesized and tested for use in the imaging and treatment of endometrial cancer. Further, libraries of molecules can be screened for potential anticancer agents by assessing the ability of the molecule to bind to the ESPs identified herein. Molecules identified in the library as being capable of binding to a ESP are key candidates for further evaluation for use in the treatment of endometrial cancer. In a preferred embodiment, these molecules will downregulate expression and/or activity of a ESP in cells.

[0418] In another embodiment of the therapeutic methods of the present invention, a pharmaceutical composition comprising a non-antibody antagonist of ESP is administered. Antagonists of ESP can be produced using methods generally known in the art. In particular, purified ESP can be used to screen libraries of pharmaceutical agents, often combinatorial libraries of small molecules, to identify those that specifically bind and antagonize at least one activity of a ESP.

[0419] In other embodiments a pharmaceutical composition comprising an agonist of a ESP is administered. Agonists can be identified using methods analogous to those used to identify antagonists.

[0420] In a preferred embodiment, the antagonist or agonist specifically binds to and antagonizes or agonizes, respectively, a ESP comprising an amino acid sequence of SEQ ID NO: 420-600, or a fusion protein, allelic variant, homolog, analog or derivative thereof. In a more preferred embodiment, the antagonist or agonist specifically binds to and antagonizes or agonizes, respectively, a ESP encoded by a nucleic acid molecule having a nucleotide sequence of SEQ ID NO: 1-419, or a part, allelic variant, substantially similar or hybridizing nucleic acid thereof.

[0421] Targeting Endometrial Tissue

[0422] The invention also provides a method in which a polypeptide of the invention, or an antibody thereto, is linked to a therapeutic agent such that it can be delivered to the endometrial or to specific cells in the endometrial. In a preferred embodiment, an anti-ESP antibody is linked to a therapeutic agent and is administered to a patient in need of such therapeutic agent. The therapeutic agent may be a toxin, if endometrial tissue needs to be selectively destroyed. This would be useful for targeting and killing endometrial cancer cells. In another embodiment, the therapeutic agent may be a growth or differentiation factor, which would be useful for promoting endometrial cell function.

[0423] In another embodiment, an anti-ESP antibody may be linked to an imaging agent that can be detected using, e.g., magnetic resonance imaging, CT or PET. This would be useful for determining and monitoring endometrial function, identifying endometrial cancer tumors, and identifying noncancerous endometrial diseases.

### EXAMPLES

### Example 1

### Gene Expression Analysis

[0424] Custom CLASP Experiment

[0425] ESGs were identified by a systematic analysis of gene expression data in the LIFESEQ® Gold database available from Incyte Genomics Inc (Palo Alto, Calif.) using the data mining software package CLASP™ (Candidate Lead Automatic Search Program). CLASP™ is a set of algorithms that interrogate Incyte's database to identify genes that are both specific to particular tissue types as well as differentially expressed in tissues from patients with cancer. LifeSeq® Gold contains information about which genes are expressed in various tissues in the body and about the dynamics of expression in both normal and diseased states. CLASP™ first sorts the LifeSeq® Gold database into defined tissue types, such as breast, ovary and prostate. CLASP™ categorizes each tissue sample by disease state. Disease states include “healthy,” “cancer,” “associated with cancer,” “other disease” and “other.” Categorizing the disease states improves our ability to identify tissue and cancer-specific molecular targets. CLASP™ then performs a simultaneous parallel search for genes that are expressed both (1) selectively in the defined tissue type compared to other tissue types and (2) differentially in the “cancer” disease state compared to the other disease states affecting the same, or different, tissues. This sorting is accomplished by using mathematical and statistical filters that specify the minimum change in expression levels and the minimum frequency that the differential expression pattern must be observed across the tissue samples for the gene to be considered statistically significant. The CLASP™ algorithm quantifies the relative abundance of a particular gene in each tissue type and in each disease state.

[0426] To find the ESGs of this invention, the following specific CLASP™ profiles were utilized: tissue-specific expression (CLASP 1), detectable expression only in cancer tissue (CLASP 2), maximal expression in cancer (CLASP 4) and differential expression in cancer tissue (CLASP 5). cDNA libraries were divided into 60 unique tissue types (early versions of LifeSeq® had 48 tissue types). Genes or ESTs were grouped into “gene bins,” where each bin is a cluster of sequences grouped together where they share a common contig. The expression level for each gene bin was calculated for each tissue type. Differential expression significance was calculated with rigorous statistical significant testing taking into account variations in sample size and relative gene abundance in different libraries and within each library (for the equations used to determine statistically significant expression see Audic and Claverie “The significance of digital gene expression profiles,” Genome Res 7(10): 986-995 (1997), including Equation 1 on page 987 and Equation 2 on page 988, the contents of which are incorporated by reference). Differentially expressed tissue-specific genes were selected based on the percentage abundance level in the targeted tissue versus all the other tissues (tissue-specificity). The expression levels for each gene in libraries of normal tissues or non-tumor tissues from cancer patients were compared with the expression levels in tissue libraries associated with tumor or disease (cancer-specificity). The results were analyzed for statistical significance.

[0427] The selection of the target genes meeting the rigorous CLASP™ profile criteria were as follows:
[0428] (a) CLASP 1: tissue-specific expression: To qualify as a CLASP 1 candidate, a gene must exhibit statistically significant expression in the tissue of interest compared to all other tissues. Only if the gene exhibits such differential expression with a 90% of confidence level is it selected as a CLASP 1 candidate.
[0429] (b) CLASP 2: detectable expression only in cancer tissue: To qualify as a CLASP 2 candidate, a gene must exhibit detectable expression in tumor tissues and undetectable expression in libraries from normal individuals and libraries from normal tissue obtained from diseased patients. In addition, such a gene must also exhibit further specificity for the tumor tissues of interest.
[0430] (c) CLASP 4: maximum differential expression in cancer: To qualify as a CLASP 4 candidate, the lead must exhibit be one of the top50 genes showing maximal differential expression in cancer tissues. In addition, such a gene must also exhibit further specificity for the tumor tissues of interest.
[0431] (d) CLASP 5: differential expression in cancer tissue: To qualify as a CLASP 5 candidate, a gene must be differentially expressed in tumor libraries in the tissue of interest compared to normal libraries for all tissues. Only if the gene exhibits such differential expression with a 90% of confidence level is it selected as a CLASP 5 candidate.
   The CLASP scores for SEQ ID NO: 1-419 are listed below:

[0432] Expression data is not presented for many specific splice variants, however at least one transcript for the splice variant family is supported by expression data shown in the table. Splice variants may share similar regions among various transcripts and therefore data for one variant may be relevant to another. This supporting data is available on request. There are 2 values for each organ in the format 9-0.9999. The first represent the number of occurrences of the gene in the given organ. The 2nd number represents the percentage of the expression of the gene in the given organ.

| | | | | | | | |
|---|---|---|---|---|---|---|---|
| DEX0378_1.nt.1 | SEQID | CLASP2 | UTR.003 | | | | |
| | NO. 1 | | | | | | |
| DEX0378_2.nt.1 | SEQID | CLASP1 | UTR.0011 | BRN.0001 | FTS.0001 | MAM.0004 | BLO.0006 |
| | NO. 3 | | | | | | |
| DEX0378_3.nt.1 | SEQID | CLASP2 | UTR.0098 | | | | |
| | NO. 4 | | | | | | |
| DEX0378_4.nt.1 | SEQID | CLASP1 | UTR.0011 | | | | |
| | NO. 6 | | | | | | |
| DEX0378_5.nt.1 | SEQID | CLASP1 | UTR.0011 | FTS.0001 | SKN.0015 | | |
| | NO. 8 | | | | | | |
| DEX0378_5.nt.2 | SEQID | CLASP5 | | THR.0045 | LIV.0057 | CON.0068 | PLE.015 |
| | NO. 9 | | | | | | |
| DEX0378_6.nt.2 | SEQID | CLASP5 | UTR.0031 | MAM.0005 | LNG.0006 | ADR.0015 | BLV.001G |
| | NO. 17 | CLASP3 | | | | | |
| DEX0378_6.nt.2 | SEQID | CLASP5 | UTR.0031 | MAM.0005 | LNG.0006 | ADR.0015 | BLV.0016 |
| | NO. 18 | CLASP3 | | | | | |
| DEX0378_7.nt.1 | SEQID | CLASP1 | UTR.0018 | BRN.0001 | FTS.0004 | PRO.0007 | BLD.0016 |
| | NO. 20 | | | | | | |
| DEX0378_8.nt.1 | SEQID | CLASP2 | UTR.003 | | | | |
| | NO. 21 | | | | | | |
| DEX0378_9.nt.1 | SEQID | CLASP1 | UTR.0011 | MAM.0004 | | | |
| | NO. 23 | | | | | | |
| DEX0378_10.nt.1 | SEQID | CLASP5 | UTR.0019 | BRN.0001 | PRO.0003 | FTS.0003 | |
| | NO. 49 | CLASP1 | | | | | |
| DEX0378_11.nt.1 | SEQID | CLASP2 | UTR.0098 | | | | |
| | NO. 78 | | | | | | |
| DEX0378_12.nt.1 | SEQID | CLASP2 | UTR.003 | | | | |
| | NO. 80 | | | | | | |
| DEX0378_12.nt.2 | SEQID | CLASP2 | UTR.003 | | | | |
| | NO. 81 | | | | | | |
| DEX0378_13.nt.1 | SEQID | CLASP1 | UTR.0011 | OVR.0007 | | | |
| | NO. 84 | | | | | | |
| DEX0378_14.nt.1 | SEQID | CLASP5 | | LMN.0083 | THR.0091 | | |
| | NO. 86 | | | | | | |
| DEX0378_15.nt.1 | SEQID | CLASP2 | UTR.003 | | | | |
| | NO. 90 | | | | | | |
| DEX0378_16.nt.1 | SEQID | CLASP1 | UTR.0011 | BRN.0001 | | | |
| | NO. 92 | | | | | | |
| DEX0378_17.nt.1 | SEQID | CLASP2 | UTR.003 | | | | |
| | NO. 95 | | | | | | |
| DEX0378_17.nt.2 | SEQID | CLASP2 | UTR.003 | | | | |
| | NO. 96 | | | | | | |
| DEX0378_18.nt.1 | SEQID | CLASP1 | UTR.0022 | FTS.0004 | BRN.0006 | UNC.0022 | |
| | NO. 98 | | | | | | |
| DEX0378_18.nt.2 | SEQID | CLASP1 | UTR.0022 | FTS.0004 | BRN.0006 | UNC.0022 | |
| | NO. 99 | | | | | | |
| DEX0378_19.nt.1 | SEQID | CLASP1 | UTR.0011 | FTS.0001 | | | |
| | NO. 101 | | | | | | |
| DEX0378_20.nt.1 | SEQID | CLASP1 | UTR.0011 | KID.0006 | INL.0008 | INS.0009 | UNC.0011 |
| | NO. 105 | | | | | | |
| DEX0378_20.nt.2 | SEQID | CLASP5 | UTR.0151 | SPL.0021 | LMN.0028 | BLO.004 | NRV.0041 |
| | NO. 106 | CLASP4 | | | | | |
| DEX0378_21.nt.1 | SEQID | CLASP1 | UTR.0011 | INS.0009 | | | |
| | NO. 138 | | | | | | |
| DEX0378_22.nt.1 | SEQID | CLASP1 | UTR.0011 | | | | |
| | NO. 140 | | | | | | |
| DEX0378_22.nt.2 | SEQID | CLASP1 | UTR.0011 | | | | |
| | NO. 141 | | | | | | |
| DEX0378_23.nt.1 | SEQID | CLASP1 | UTR.0011 | | | | |
| | NO. 145 | | | | | | |
| DEX0378_24.nt.1 | SEQID | CLASP1 | UTR.0011 | BRN.0003 | | | |
| | NO. 147 | | | | | | |
| DEX0378_25.nt.1 | SEQID | CLASP1 | UTR .0011 | FTS.0001 | | | |
| | NO. 150 | | | | | | |
| DEX0378_26.nt.1 | SEQID | CLASP5 | UTR.0011 | OVR.0007 | OVR.001 | | |
| | NO. 152 | CLASP1 | | | | | |
| DEX0378_27.nt.1 | SEQID | CLASP1 | UTR.0011 | | | | |
| | NO. 155 | | | | | | |
| DEX0378_28.nt.1 | SEQID | CLASP1 | UTR.0014 | BRN.0001 | FTS.0003 | | |
| | NO. 157 | | | | | | |
| DEX0378_28.nt.2 | SEQID | CLASP1 | UTR.0014 | BRN.0001 | FTS.0003 | | |
| | NO. 158 | | | | | | |
| DEX0378_29.nt.1 | SEQID | CLASP5 | UTR.0025 | INL.0006 | LNG.0011 | PAN.0012 | FTS.0012 |
| | NO. 160 | CLASP3 | | | | | |
| DEX0378_29.nt.2 | SEQID | CLASP5 | UTR.0025 | INL.0006 | LNG.0011 | PAN.0012 | FTS.0012 |
| | NO. 161 | CLASP3 | | | | | |
| DEX0378_29.nt.3 | SEQID | CLASP5 | UTR.0025 | INL.0006 | LNG.0011 | PAN.0012 | FTS.0012 |
| | NO. 162 | CLASP3 | | | | | |
| DEX0378_29.nt.4 | SEQID | CLASP5 | UTR.0025 | INL.0006 | LNG.0011 | PAN.0012 | FTS.0012 |
| | NO. 163 | CLASP3 | | | | | |
| DEX0378_29.nt.5 | SEQID | CLASP5 | UTR.0025 | INL.0006 | LNG.0011 | PAN.0012 | FTS.0012 |
| | NO.164 | CLASP3 | | | | | |
| DEX0378_29.nt.6 | SEQID | CLASP5 | UTR.0025 | INL.0006 | LNG.0011 | PAN.0012 | FTS.0012 |
| | NO. 165 | CLASP3 | | | | | |
| DEX0378_29.nt.7 | SEQID | CLASP5 | UTR.0025 | INL.0006 | LNG.0011 | PAN.0012 | FTS.0012 |
| | NO. 166 | CLASP3 | | | | | |
| DEX0378_29.nt.8 | SEQID | CLASP5 | UTR.0025 | INL.0006 | LNG.0011 | PAN.0012 | FTS.0012 |
| | NO. 167 | CLASP3 | | | | | |
| DEX0378_29.nt.9 | SEQID | CLASP5 | UTR.0025 | INL.0006 | LNG.0011 | PAN.0012 | FTS.0012 |
| | NO. 168 | CLASP3 | | | | | |
| DEX0378_29.nt.10 | SEQID | CLASP5 | UTR.0025 | INL.0006 | LNG.0011 | PAN.0012 | FTS.0012 |
| | NO. 169 | CLASP3 | | | | | |
| DEX0378_29.nt.11 | SEQID | CLASP5 | UTR.0025 | INL.0006 | LNG.0011 | PAN.0012 | FTS.0012 |
| | NO. 170 | CLASP3 | | | | | |
| DEX0378_30.nt.1 | SEQID | CLASP1 | UTR.0014 | BRN.0001 | NRV.0008 | | |
| | NO. 190 | | | | | | |
| DEX0378_31.nt.1 | SEQID | CLASP1 | UTR.0011 | | | | |
| | NO. 192 | | | | | | |
| DEX0378_32.nt.1 | SEQID | CLASP1 | UTR.0014 | BRN.0001 | FTS.0004 | THR.002 | GEM.0021 |
| | NO. 193 | | | | | | |
| DEX0378_33.nt.1 | SEQID | CLASP1 | UTR.0011 | | | | |
| | NO. 194 | | | | | | |
| DEX0378_33.nt.2 | SEQID | CLASP1 | UTR.0011 | | | | |
| | NO. 195 | | | | | | |
| DEX0378_34.nt.1 | SEQID | CLASP1 | UTR.0014 | FTS.0001 | BLO.0003 | BLV.0006 | ADR.0013 |
| | NO. 197 | | | | | | |
| DEX0378_34.nt.2 | SEQID | CLASP1 | UTR.0014 | FTS.0001 | BLO.0003 | BLV.0006 | ADR.0013 |
| | NO. 198 | | | | | | |
| DEX0378_34.nt.3 | SEQID | CLASP1 | UTR.0014 | FTS.0001 | BLO.0003 | BLV.0006 | ADR.0013 |
| | NO. 199 | | | | | | |
| DEX0378_35.nt.1 | SEQID | CLASP2 | UTR.0094 | | | | |
| | NO. 202 | | | | | | |
| DEX0378_36.nt.1 | SEQID | CLASP2 | UTR.0094 | | | | |
| | NO. 205 | | | | | | |
| DEX0378_37.nt.1 | SEQID | CLASP2 | UTR.0064 | ADR.0018 | | | |
| | NO. 207 | | | | | | |
| DEX0378_37.nt.2 | SEQID | CLASP5 | | BLD.0016 | | | |
| | NO. 208 | | | | | | |
| DEX0378_38.nt.1 | SEQID | CLASP1 | UTR.0022 | FTS.0004 | BRN.0006 | UNC.0022 | |
| | NO. 217 | | | | | | |
| DEX0378_39.nt.1 | SEQID | CLASP1 | UTR.0011 | BRN.0001 | | | |
| | NO. 220 | | | | | | |
| DEX0378_40.nt.1 | SEQID | CLASP2 | UTR.0098 | CON.0016 | | | |
| | NO. 222 | | | | | | |
| DEX0378_41.nt.1 | SEQID | CLASP5 | UTR.0011 | MAM.0004 | BMR.0015 | BLD.0016 | BLD.0016 |
| | NO. 224 | CLASP1 | | | | | |
| DEX0378_42.nt.1 | SEQID | CLASP2 | UTR.0115 | FAL.0056 | | | |
| | NO. 226 | | | | | | |
| DEX0378_42.nt.2 | SEQID | CLASP2 | UTR.0115 | FAL.0056 | | | |
| | NO. 227 | | | | | | |
| DEX0378_42.nt.3 | SEQID | CLASP2 | UTR.0115 | FAL.0056 | | | |
| | NO. 228 | | | | | | |
| DEX0378_42.nt.4 | SEQID | CLASP2 | UTR.0115 | FAL.0056 | | | |
| | NO. 229 | | | | | | |
| DEX0378_43.nt.1 | SEQID | CLASP5 | UTR.0036 | BLO.0003 | KID.0006 | FTS.0009 | LIV.0011 |
| | NO. 236 | CLASP1 | | | | | |
| DEX0378_44.nt.1 | SEQID | CLASP5 | UTR.0019 | UNC.0011 | THR.002 | STO.0021 | |
| | NO. 251 | CLASP1 | | | | | |
| DEX0378_45.nt.1 | SEQID | CLASP1 | UTR.0011 | | | | |
| | NO. 253 | | | | | | |
| DEX0378_46.nt.1 | SEQID | CLASP1 | UTR.0018 | BLO.0003 | | | |
| | NO. 255 | | | | | | |
| DEX0378_47.nt.1 | SEQID | CLASP1 | UTR.0011 | | | | |
| | NO. 257 | | | | | | |
| DEX0378_48.nt.1 | SEQID | CLASP5 | UTR.0025 | LNG.0007 | LIV.0011 | INL.0012 | INL.0019 |
| | NO. 259 | CLASP1 | | | | | |
| DEX0378_48.nt.2 | SEQID | CLASP5 | UTR.0025 | LNG.0007 | LIV.0011 | INL.0012 | INL.0019 |
| | NO. 260 | CLASP1 | | | | | |
| DEX0378_49.nt.1 | SEQID | CLASP2 | UTR.0157 | | | | |
| | NO. 263 | | | | | | |
| DEX0378_50.nt.1 | SEQID | CLASP2 | UTR.0045 | | | | |
| | NO. 265 | CLASP1 | | | | | |
| | | CLASP4 | | | | | |
| DEX0378_50.nt.2 | SEQID | CLASP2 | UTR.0045 | | | | |
| | NO. 266 | CLASP1 | | | | | |
| | | CLASP4 | | | | | |
| DEX0378_51.nt.1 | SEQID | CLASP1 | UTR.0011 | | | | |
| | NO. 268 | | | | | | |
| DEX0378_52.nt.1 | SEQID | CLASP1 | UTR.0014 | FTS.0004 | | | |
| | NO. 269 | | | | | | |
| DEX0378_53.nt.1 | SEQID | CLASP2 | UTR.0094 | | | | |
| | NO. 272 | | | | | | |
| DEX0378_53.nt.2 | SEQID | CLASP2 | UTR.0094 | | | | |
| | NO. 273 | | | | | | |
| DEX0378_54.nt.1 | SEQID | CLASP1 | UTR.0018 | BLO.0003 | | | |
| | NO. 275 | | | | | | |
| DEX0378_55.nt.1 | SEQID | CLASP1 | UTR.0014 | BRN.0003 | PRO.0003 | FTS.0003 | MAM.0004 |
| | NO. 277 | | | | | | |
| DEX0378_55.nt.2 | SEQID | CLASP1 | UTR.0014 | BRN.0003 | PRO.0003 | FTS.0003 | MAM.0004 |
| | NO. 278 | | | | | | |
| DEX0378_56.nt.1 | SEQID | CLASP5 | UTR.0031 | MAM.0005 | LNG.0006 | ADR.0015 | BLV.0016 |
| | NO. 293 | CLASP3 | | | | | |
| DEX0378_57.nt.1 | SEQID | CLASP1 | UTR.0011 | BRN.0001 | PRO.0003 | | |
| | NO. 299 | | | | | | |
| DEX0378_58.nt.1 | SEQID | CLASP1 | UTR.0011 | INL.0004 | | | |
| | NO. 301 | | | | | | |
| DEX0378_59.nt.1 | SEQID | CLASP1 | UTR.0014 | MAM.0004 | | | |
| | NO. 304 | | | | | | |
| DEX0378_59.nt.2 | SEQID | CLASP1 | UTR.0014 | MAM.0004 | | | |
| | NO. 305 | | | | | | |
| DEX0378_60.nt.1 | SEQID | CLASP1 | UTR.0018 | | | | |
| | NO. 313 | | | | | | |
| DEX0378_61.nt.1 | SEQID | CLASP2 | UTR.003 | | | | |
| | NO. 315 | | | | | | |
| DEX0378_62.nt.1 | SEQID | CLASP1 | UTR.0011 | LNG.0003 | FTS.0005 | | |
| | NO. 317 | | | | | | |
| DEX0378_63.nt.1 | SEQID | CLASP1 | UTR.0011 | BRN.0003 | | | |
| | NO. 319 | | | | | | |
| DEX0378_63.nt.2 | SEQID | CLASP1 | UTR.0011 | BRN.0003 | | | |
| | NO. 320 | | | | | | |
| DEX0378_64.nt.1 | SEQID | CLASP5 | | OVR.0031 | | | |
| | NO. 323 | | | | | | |
| DEX0378_65.nt.1 | SEQID | CLASP2 | UTR.0141 | | | | |
| | NO. 333 | CLASP1 | | | | | |
| | | CLASP4 | | | | | |
| DEX0378_66.nt.1 | SEQID | CLASP1 | UTR.0014 | | | | |
| | NO. 335 | | | | | | |
| DEX0378_66.nt.2 | SEQID | CLASP1 | UTR.0014 | | | | |
| | NO. 336 | | | | | | |
| DEX0378_67.nt.1 | SEQID | CLASP2 | UTR.0094 | | | | |
| | NO. 338 | | | | | | |
| DEX0378_67.nt.2 | SEQID | CLASP2 | UTR.0094 | | | | |
| | NO. 339 | | | | | | |
| DEX0378_68.nt.1 | SEQID | CLASP5 | UTR.0025 | INL.0006 | BLV.0016 | INS.0019 | ADR.003 |
| | NO. 341 | CLASP3 | | | | | |
| DEX0378_68.nt.2 | SEQID | CLASP5 | UTR.0025 | INL.0006 | BLV.0016 | INS.0019 | ADR.003 |
| | NO. 342 | CLASP3 | | | | | |
| DEX0378_69.nt.1 | SEQID | CLASP1 | UTR.0011 | | | | |
| | NO. 344 | | | | | | |
| DEX0378_70.nt.1 | SEQID | CLASP1 | UTR.0011 | FTS.0003 | | | |
| | NO. 346 | | | | | | |
| DEX0378_71.nt.1 | SEQID | CLASP2 | UTR.0141 | BLO.0003 | | | |
| | NO. 364 | CLASP1 | | | | | |
| | | CLASP4 | | | | | |
| DEX0378_71.nt.2 | SEQID | CLASP2 | UTR.0141 | BLO.0003 | | | |
| | NO. 365 | CLASP1 | | | | | |
| | | CLASP4 | | | | | |
| DEX0378_72.nt.1 | SEQID | CLASP1 | UTR.0014 | | | | |
| | NO. 368 | | | | | | |
| DEX0378_73.nt.1 | SEQID | CLASP1 | UTR.0011 | KID.0006 | BLD.0016 | | |
| | NO. 370 | | | | | | |
| DEX0378_74.nt.1 | SEQID | CLASP2 | UTR.0098 | | | | |
| | NO. 372 | | | | | | |
| DEX0378_75.nt.1 | SEQID | CLASP1 | UTR.0011 | | | | |
| | NO. 374 | | | | | | |
| DEX0378_76.nt.1 | SEQID | CLASP1 | UTR.0011 | PRO.0003 | FTS.0003 | | |
| | NO. 376 | | | | | | |
| DEX0378_77.nt.1 | SEQID | CLASP5 | UTR.0019 | | | | |
| | NO. 378 | CLASP1 | | | | | |
| DEX0378_78.nt.1 | SEQID | CLASP5 | | MAM.0005 | | | |
| | NO. 380 | | | | | | |
| DEX0378_79.nt.1 | SEQID | CLASP5 | UTR.0025 | FTS.0001 | OVR.0007 | PTH.004 | |
| | NO. 382 | CLASP1 | | | | | |
| DEX0378_79.nt.2 | SEQID | CLASP5 | UTR.0025 | FTS.0001 | OVR.0007 | PTH.004 | |
| | NO. 383 | CLASP1 | | | | | |
| DEX0378_80.nt.1 | SEQID | CLASP1 | UTR.0014 | FTS.0001 | PRO.0003 | MAM.0004 | UNC.0011 |
| | NO. 385 | | | | | | |
| DEX0378_80.nt.2 | SEQID | CLASP1 | UTR.0014 | FTS.0001 | PRO.0003 | MAM.0004 | UNC.0011 |
| | NO. 386 | | | | | | |
| DEX0378_81.nt.1 | SEQID | CLASP5 | UTR.0056 | BRN.0003 | FTS.0003 | KID.0006 | BLV.0006 |
| | NO. 390 | CLASP1 | | | | | |
| DEX0378_82.nt.1 | SEQID | CLASP1 | UTR.0011 | FTS.0001 | | | |
| | NO. 391 | | | | | | |
| DEX0378_83.nt.1 | SEQID | CLASP1 | UTR.0011 | BRN.0001 | INL.0004 | | |
| | NO. 393 | | | | | | |
| DEX0378_84.nt.1 | SEQID | CLASP1 | UTR.0011 | | | | |
| | NO. 395 | | | | | | |
| DEX0378_85.nt.1 | SEQID | CLASP1 | UTR.0011 | FTS.0001 | | | |
| | NO. 397 | | | | | | |
| DEX0378_86.nt.1 | SEQID | CLASP1 | UTR.0011 | BRN.0001 | PRO.0003 | | |
| | NO. 399 | | | | | | |
| DEX0378_86.nt.2 | SEQID | CLASP1 | UTR.0011 | BRN.0001 | PRO.0003 | | |
| | NO. 400 | | | | | | |
| DEX0378_87.nt.1 | SEQID | CLASP5 | UTR.0019 | | | | |
| | NO. 402 | CLASP1 | | | | | |
| DEX0378_88.nt.1 | SEQID | CLASP2 | UTR.003 | | | | |
| | NO. 404 | | | | | | |
| DEX0378_89.nt.1 | SEQID | CLASP2 | UTR.003 | | | | |
| | NO. 406 | | | | | | |
| DEX0378_90.nt.1 | SEQID | CLASP1 | UTR.0014 | PIT.0029 | | | |
| | NO. 407 | | | | | | |
| DEX0378_91.nt.1 | SEQID | CLASP1 | UTR.0011 | OVR.0007 | | | |
| | NO. 408 | | | | | | |
| DEX0378_92.nt.1 | SEQID | CLASP1 | UTR.0014 | FTS.0001 | BLO.0003 | BLV.0006 | ADR.0013 |
| | NO. 409 | | | | | | |
| DEX0378_94.nt.1 | SEQID | CLASP1 | UTR.0011 | BRN.0003 | | | |
| | NO. 411 | | | | | | |
| DEX0378_95.nt.1 | SEQID | CLASP5 | UTR.5313 | THY.002 | PIT.0041 | BRN.0094 | SYN.0112 |
| | NO. 412 | CLASP3 | | | | | |
| DEX0378_96.nt.1 | SEQID | CLASP5 | UTR.0019 | | | | |
| | NO. 413 | CLASP1 | | | | | |
| DEX0378_97.nt.1 | SEQID | CLASP5 | UTR.5646 | SAG.1383 | PIT.2301 | BMR.2381 | URE.2474 |
| | NO. 414 | CLASP4 | | | | | |
| | | CLASP4 | | | | | |
| | | CLASP4 | | | | | |
| | | CLASP4 | | | | | |
| | | CLASP4 | | | | | |
| | | CLASP4 | | | | | |
| DEX0378_98.nt.1 | SEQID | CLASP5 | UTR.0011 | OVR.0007 | OVR.001 | | |
| | NO. 415 | CLASP1 | | | | | |
| DEX0378_99.nt.1 | SEQID | CLASP5 | UTR.0025 | BRN.0001 | | | |
| | NO. 416 | CLASP1 | | | | | |
| DEX0378_100.nt.1 | SEQID | CLASP1 | UTR.0011 | | | | |
| | NO. 417 | | | | | | |
| DEX0378_101.nt.1 | SEQID | CLASP5 | UTR.0019 | BRN.0001 | PRO.0003 | FTS.0003 | |
| | NO. 418 | CLASP1 | | | | | |
| DEX0378_102.nt.1 | SEQID | CLASP2 | UTR.0091 | | | | |
| | NO. 419 | | | | | | |

Abbreviation for tissues:
ADR Adrenal Glands,
BLD Bladder,
BLO Blood,
BLV Blood Vessels,
BRN Brain,
CON Connective Tissue,
ESO Esophagus,
FTS Fetus,
INL Intestine, Large,
INS Intestine, Small,
LNG Lung,
MAM Breast,
NRV Nervous Tissue,
OVR Ovary,
PAN Pancreas,
PNS Penis,
PRO Prostate,
SPL Spleen,
STO Stomach,
SYN Synovial Membranes,
THR Thyroid Gland,
THY Thymus Gland,
UNC Mixed Tissues,
UTR Uterus

[0433] The mapping of the nucleic acid (“NT”) SEQ ID NO; DEX ID; chromosomal location (if known); open reading frame (ORF) location; amino acid (“AA”) SEQ ID NO and AA DEX ID are shown in the table below:

| NT | | Chromo | | AA | |
|---|---|---|---|---|---|
| SEQ_No | NT_SEQID | Map | ORF_Loc | SEQ_NO | AA_SEQID |
| 1 | DEX0378_1.nt.1 | 7q22.1 | | 420 | DEX0378_1.aa.1 |
| 2 | DEX0378_1.nt.2 | 7q22.1 | — | | |
| 3 | DEX0378_2.nt.1 | *8p12 | | 421 | DEX0378_2.aa.1 |
| 4 | DEX0378_3.nt.1 | 1p31.3 | | 422 | DEX0378_3.aa.1 |
| 5 | DEX0378_3.nt.2 | 1p31.3 | — | | |
| 6 | DEX0378_4.nt.1 | 10q23.33 | | 423 | DEX0378_4.aa.1 |
| 7 | DEX0378_4.nt.2 | 10q23.33 | — | | |
| 8 | DEX0378_5.nt.1 | 4p16.3 | | 424 | DEX0378_5.aa.1 |
| 9 | DEX0378_5.nt.2 | 4p16.3 | | | |
| 10 | DEX0378_5.nt.3 | 4p16.3 | — | | |
| 11 | DEX0378_5.nt.4 | 4p16.3 | 1-341 | 425 | DEX0378_5.aa.4 |
| 12 | DEX0378_5.nt.5 | 4p16.3 | 544-1201 | 426 | DEX0378_5.aa.5 |
| 13 | DEX0378_5.nt.6 | 4p16.3 | 2118-2619 | 427 | DEX0378_5.aa.6 |
| 14 | DEX0378_5.nt.7 | 4p16.3 | — | | |
| 15 | DEX0378_5.nt.8 | 4p16.3 | 1-421 | 428 | DEX0378_5.aa.8 |
| 16 | DEX0378_5.nt.9 | 4p16.3 | 1-115 | 429 | DEX0378_5.aa.9 |
| 17 | DEX0378_6.nt.1 | 17p13.2 | | 430 | DEX0378_6.aa.1 |
| 18 | DEX0378_6.nt.2 | 17p13.2 | | | |
| 19 | DEX0378_6.nt.3 | 17p13.2 | 626-1046 | 431 | DEX0378_6.aa.3 |
| 20 | DEX0378_7.nt.1 | 15q22.2 | | 432 | DEX0378_7.aa.1 |
| 21 | DEX0378_8.nt.1 | 3p26.1 | | 433 | DEX0378_8.aa.1 |
| 22 | DEX0378_8.nt.2 | 3p26.1 | — | | |
| 23 | DEX0378_9.nt.1 | 2q13 | | 434 | DEX0378_9.aa.1 |
| 24 | DEX0378_9.nt.2 | 2q13 | — | | |
| 25 | DEX0378_9.nt.3 | 2q13 | 1-418 | 435 | DEX0378_9.aa.3 |
| 26 | DEX0378_9.nt.4 | 2q13 | 16-494 | 436 | DEX0378_9.aa.4 |
| 27 | DEX0378_9.nt.5 | 2q13 | — | | |
| 28 | DEX0378_9.nt.6 | 2q13 | 2356-2788 | 437 | DEX0378_9.aa.6 |
| 29 | DEX0378_9.nt.7 | 2q13 | — | | |
| 30 | DEX0378_9.nt.8 | 2q13 | 16-467 | 438 | DEX0378_9.aa.8 |
| 31 | DEX0378_9.nt.9 | 2q13 | — | | |
| 32 | DEX0378_9.nt.10 | 2q13 | — | | |
| 33 | DEX0378_9.nt.11 | 2q13 | — | | |
| 34 | DEX0378_9.nt.12 | 2q13 | — | | |
| 35 | DEX0378_9.nt.13 | 2q13 | — | | |
| 36 | DEX0378_9.nt.14 | 2q13 | — | | |
| 37 | DEX0378_9.nt.15 | 2q13 | — | | |
| 38 | DEX0378_9.nt.16 | 2q13 | — | | |
| 39 | DEX0378_9.nt.17 | 2q13 | — | | |
| 40 | DEX0378_9.nt.18 | 2q13 | — | | |
| 41 | DEX0378_9.nt.19 | 2q13 | — | | |
| 42 | DEX0378_9.nt.20 | 2q13 | 2356-2737 | 439 | DEX0378_9.aa.20 |
| 43 | DEX0378_9.nt.21 | 2q13 | 85-1607 | 440 | DEX0378_9.aa.21 |
| 44 | DEX0378_9.nt.22 | 2q13 | 59-509 | 441 | DEX0378_9.aa.22 |
| 45 | DEX0378_9.nt.23 | 2q13 | — | | |
| 46 | DEX0378_9.nt.24 | 2q13 | 528-999 | 442 | DEX0378_9.aa.24 |
| 47 | DEX0378_9.nt.25 | 2q13 | 244-807 | 443 | DEX0378_9.aa.25 |
| 48 | DEX0378_9.nt.26 | 2q13 | 1-107 | 444 | DEX0378_9.aa.26 |
| 49 | DEX0378_10.nt.1 | 2p14 | | | |
| 50 | DEX0378_10.nt.2 | 2p14 | — | | |
| 51 | DEX0378_10.nt.3 | 2p14 | — | | |
| 52 | DEX0378_10.nt.4 | 2p14 | — | | |
| 53 | DEX0378_10.nt.5 | 2p14 | 90-1263 | 445 | DEX0378_10.aa.5 |
| 54 | DEX0378_10.nt.6 | 2p14 | 1993-3196 | 446 | DEX0378_10.aa.6 |
| 55 | DEX0378_10.nt.7 | 2p14 | 338-1505 | 447 | DEX0378_10.aa.7 |
| 56 | DEX0378_10.nt.8 | 2p14 | 90-1311 | 448 | DEX0378_10.aa.8 |
| 57 | DEX0378_10.nt.9 | 2p14 | 131-872 | 449 | DEX0378_10.aa.9 |
| 58 | DEX0378_10.nt.10 | 2p14 | — | | |
| 59 | DEX0378_10.nt.11 | 2p14 | 251-566 | 450 | DEX0378_10.aa.11 |
| 60 | DEX0378_10.nt.12 | 2p14 | — | | |
| 61 | DEX0378_10.nt.13 | 2p14 | 1993-2971 | 451 | DEX0378_10.aa.13 |
| 62 | DEX0378_10.nt.14 | 2p14 | 1993-2971 | 451 | DEX0378_10.aa.13 |
| 63 | DEX0378_10.nt.15 | 2p14 | — | | |
| 64 | DEX0378_10.nt.16 | 2p14 | 1993-2971 | 451 | DEX0378_10.aa.13 |
| 65 | DEX0378_10.nt.17 | 2p14 | 1993-3163 | 452 | DEX0378_10.aa.17 |
| 66 | DEX0378_10.nt.18 | 2p14 | 90-333 | 453 | DEX0378_10.aa.18 |
| 67 | DEX0378_10.nt.19 | 2p14 | 90-333 | 453 | DEX0378_10.aa.18 |
| 68 | DEX0378_10.nt.20 | 2p14 | 90-1263 | 445 | DEX0378_10.aa.5 |
| 69 | DEX0378_10.nt.21 | 2p14 | 1993-2971 | 451 | DEX0378_10.aa.13 |
| 70 | DEX0378_10.nt.22 | 2p14 | 1993-2935 | 454 | DEX0378_10.aa.22 |
| 71 | DEX0378_10.nt.23 | 2p14 | 621-1362 | 449 | DEX0378_10.aa.9 |
| 72 | DEX0378_10.nt.24 | 2p14 | 390-1131 | 449 | DEX0378_10.aa.9 |
| 73 | DEX0378_10.nt.25 | 2p14 | 197-638 | 455 | DEX0378_10.aa.25 |
| 74 | DEX0378_10.nt.26 | 2p14 | 1993-2971 | 451 | DEX0378_10.aa.13 |
| 75 | DEX0378_10.nt.27 | 2p14 | 1993-2935 | 454 | DEX0378_10.aa.22 |
| 76 | DEX0378_10.nt.28 | 2p14 | 1993-2767 | 456 | DEX0378_10.aa.28 |
| 77 | DEX0378_10.nt.29 | 2p14 | — | | |
| 78 | DEX0378_11.nt.1 | 11p11.2 | | 457 | DEX0378_11.aa.1 |
| 79 | DEX0378_11.nt.2 | 11p11.2 | — | | |
| 80 | DEX0378_12.nt.1 | 10p12.31 | | 458 | DEX0378_12.aa.1 |
| 81 | DEX0378_12.nt.2 | 10p12.31 | | | |
| 82 | DEX0378_12.nt.3 | 10p12.31 | — | | |
| 83 | DEX0378_12.nt.4 | 10p12.31 | — | | |
| 84 | DEX0378_13.nt.1 | 15q14 | | 459 | DEX0378_13.aa.1 |
| 85 | DEX0378_13.nt.2 | 15q14 | — | | |
| 86 | DEX0378_14.nt.1 | 1p35.2 | | | |
| 87 | DEX0378_14.nt.2 | 1p35.2 | — | | |
| 88 | DEX0378_14.nt.3 | 1p35.2 | — | | |
| 89 | DEX0378_14.nt.4 | 1p35.2 | — | | |
| 90 | DEX0378_15.nt.1 | 8p12 | | 460 | DEX0378_15.aa.1 |
| 91 | DEX0378_15.nt.2 | 8p12 | — | | |
| 92 | DEX0378_16.nt.1 | 2q32.1 | | 461 | DEX0378_16.aa.1 |
| 93 | DEX0378_16.nt.2 | 2q32.1 | — | | |
| 94 | DEX0378_16.nt.3 | 2q32.1 | — | | |
| 95 | DEX0378_17.nt.1 | 12p12.1 | | 462 | DEX0378_17.aa.1 |
| 96 | DEX0378_17.nt.2 | 12p12.1 | | | |
| 97 | DEX0378_17.nt.3 | 12p12.1 | — | | |
| 98 | DEX0378_18.nt.1 | 13q13.3 | | 463 | DEX0378_18.aa.1 |
| 99 | DEX0378_18.nt.2 | 13q13.3 | | | |
| 100 | DEX0378_18.nt.3 | 13q13.3 | — | | |
| 101 | DEX0378_19.nt.1 | 3p13 | | | |
| 102 | DEX0378_19.nt.2 | 3p13 | — | | |
| 103 | DEX0378_19.nt.3 | 3p13 | — | | |
| 104 | DEX0378_19.nt.4 | 3p13 | — | | |
| 105 | DEX0378_20.nt.1 | 3p14.1 | | 464 | DEX0378_20.aa.1 |
| 106 | DEX0378_20.nt.2 | 3p14.1 | | | |
| 107 | DEX0378_20.nt.3 | 3p14.1 | 583-3866 | 465 | DEX0378_20.aa.3 |
| 108 | DEX0378_20.nt.4 | 3p14.1 | 656-862 | 466 | DEX0378_20.aa.4 |
| 109 | DEX0378_20.nt.5 | 3p14.1 | 583-3797 | 467 | DEX0378_20.aa.5 |
| 110 | DEX0378_20.nt.6 | 3p14.1 | 583-3866 | 465 | DEX0378_20.aa.3 |
| 111 | DEX0378_20.nt.7 | 3p14.1 | 583-2669 | 468 | DEX0378_20.aa.7 |
| 112 | DEX0378_20.nt.8 | 3p14.1 | 583-3866 | 465 | DEX0378_20.aa.3 |
| 113 | DEX0378_20.nt.9 | 3p14.1 | 583-3350 | 469 | DEX0378_20.aa.9 |
| 114 | DEX0378_20.nt.10 | 3p14.1 | 583-2620 | 470 | DEX0378_20.aa.10 |
| 115 | DEX0378_20.nt.11 | 3p14.1 | 583-1820 | 471 | DEX0378_20.aa.11 |
| 116 | DEX0378_20.nt.12 | 3p14.1 | 583-3866 | 465 | DEX0378_20.aa.3 |
| 117 | DEX0378_20.nt.13 | 3p14.1 | 1-1379 | 472 | DEX0378_20.aa.13 |
| 118 | DEX0378_20.nt.14 | 3p14.1 | — | | |
| 119 | DEX0378_20.nt.15 | 3p14.1 | — | | |
| 120 | DEX0378_20.nt.16 | 3p14.1 | — | | |
| 121 | DEX0378_20.nt.17 | 3p14.1 | 583-4175 | 473 | DEX0378_20.aa.17 |
| 122 | DEX0378_20.nt.18 | 3p14.1 | 583-3722 | 474 | DEX0378_20.aa.18 |
| 123 | DEX0378_20.nt.19 | 3p14.1 | 583-3203 | 475 | DEX0378_20.aa.19 |
| 124 | DEX0378_20.nt.20 | 3p14.1 | 583-2798 | 476 | DEX0378_20.aa.20 |
| 125 | DEX0378_20.nt.21 | 3p14.1 | 583-3866 | 465 | DEX0378_20.aa.3 |
| 126 | DEX0378_20.nt.22 | 3p14.1 | 1-1466 | 477 | DEX0378_20.aa.22 |
| 127 | DEX0378_20.nt.23 | 3p14.1 | 583-2654 | 478 | DEX0378_20.aa.23 |
| 128 | DEX0378_20.nt.24 | 3p14.1 | 583-3866 | 465 | DEX0378_20.aa.3 |
| 129 | DEX0378_20.nt.25 | 3p14.1 | 583-3866 | 465 | DEX0378_20.aa.3 |
| 130 | DEX0378_20.nt.26 | 3p14.1 | — | | |
| 131 | DEX0378_20.nt.27 | 3p14.1 | 583-3425 | 479 | DEX0378_20.aa.27 |
| 132 | DEX0378_20.nt.28 | 3p14.1 | 583-3203 | 475 | DEX0378_20.aa.19 |
| 133 | DEX0378_20.nt.29 | 3p14.1 | 583-2765 | 480 | DEX0378_20.aa.29 |
| 134 | DEX0378_20.nt.30 | 3p14.1 | 583-2399 | 481 | DEX0378_20.aa.30 |
| 135 | DEX0378_20.nt.31 | 3p14.1 | 1-1523 | 482 | DEX0378_20.aa.31 |
| 136 | DEX0378_20.nt.32 | 3p14.1 | — | | |
| 137 | DEX0378_20.nt.33 | 3p14.1 | 1-624 | 483 | DEX0378_20.aa.33 |
| 138 | DEX0378_21.nt.1 | 3p24.2 | | 484 | DEX0378_21.aa.1 |
| 139 | DEX0378_21.nt.2 | 3p24.2 | — | | |
| 140 | DEX0378_22.nt.1 | 18q21.33 | | 485 | DEX0378_22.aa.1 |
| 141 | DEX0378_22.nt.2 | 18q21.33 | | | |
| 142 | DEX0378_22.nt.3 | 18q21.33 | — | | |
| 143 | DEX0378_22.nt.4 | 18q21.33 | — | | |
| 144 | DEX0378_22.nt.5 | 18q21.33 | — | | |
| 145 | DEX0378_23.nt.1 | 5q13.3 | | 486 | DEX0378_23.aa.1 |
| 146 | DEX0378_23.nt.2 | 5q13.3 | — | | |
| 147 | DEX0378_24.nt.1 | 1q32.3 | | 487 | DEX0378_24.aa.1 |
| 148 | DEX0378_24.nt.2 | 1q32.3 | — | | |
| 149 | DEX0378_24.nt.3 | 1q32.3 | — | | |
| 150 | DEX0378_25.nt.1 | * | | 488 | DEX0378_25.aa.1 |
| 151 | DEX0378_25.nt.2 | * | — | | |
| 152 | DEX0378_26.nt.1 | Xq13.1 | | 489 | DEX0378_26.aa.1 |
| 153 | DEX0378_26.nt.2 | Xq13.1 | — | | |
| 154 | DEX0378_26.nt.3 | * | — | | |
| 155 | DEX0378_27.nt.1 | 16q22.1 | | 490 | DEX0378_27.aa.1 |
| 156 | DEX0378_27.nt.2 | 16q22.1 | — | | |
| 157 | DEX0378_28.nt.1 | 5q31.2 | | 491 | DEX0378_28.aa.1 |
| 158 | DEX0378_28.nt.2 | 5q31.2 | | | |
| 159 | DEX0378_28.nt.3 | 5q31.2 | — | | |
| 160 | DEX0378_29.nt.1 | 17p12 | | 492 | DEX0378_29.aa.1 |
| 161 | DEX0378_29.nt.2 | 17p12 | | | |
| 162 | DEX0378_29.nt.3 | 17p12 | | 493 | DEX0378_29.aa.3 |
| 163 | DEX0378_29.nt.4 | 17p12 | | | |
| 164 | DEX0378_29.nt.5 | 17p12 | | 494 | DEX0378_29.aa.5 |
| 165 | DEX0378_29.nt.6 | 17p12 | | | |
| 166 | DEX0378_29.nt.7 | 17p12 | | 495 | DEX0378_29.aa.7 |
| 167 | DEX0378_29.nt.8 | 17p12 | | 496 | DEX0378_29.aa.8 |
| 168 | DEX0378_29.nt.9 | 17p12 | | | |
| 169 | DEX0378_29.nt.10 | 17p12 | | 497 | DEX0378_29.aa.10 |
| 170 | DEX0378_29.nt.11 | 17p12 | | 498 | DEX0378_29.aa.11 |
| 171 | DEX0378_29.nt.12 | 17p12 | 1-220 | 499 | DEX0378_29.aa.12 |
| 172 | DEX0378_29.nt.13 | 17p12 | 1-220 | 499 | DEX0378_29.aa.12 |
| 173 | DEX0378_29.nt.14 | 17p12 | 1-220 | 499 | DEX0378_29.aa.12 |
| 174 | DEX0378_29.nt.15 | 17p12 | — | | |
| 175 | DEX0378_29.nt.16 | 17p12 | 1-220 | 499 | DEX0378_29.aa.12 |
| 176 | DEX0378_29.nt.17 | 17p12 | 1-220 | 499 | DEX0378_29.aa.12 |
| 177 | DEX0378_29.nt.18 | 17p12 | — | | |
| 178 | DEX0378_29.nt.19 | 17p12 | 1-406 | 500 | DEX0378_29.aa.19 |
| 179 | DEX0378_29.nt.20 | 17p12 | — | | |
| 180 | DEX0378_29.nt.21 | 17p12 | — | | |
| 181 | DEX0378_29.nt.22 | 17p12 | — | | |
| 182 | DEX0378_29.nt.23 | 17p12 | — | | |
| 183 | DEX0378_29.nt.24 | 17p12 | 1-220 | 499 | DEX0378_29.aa.12 |
| 184 | DEX0378_29.nt.25 | 17p12 | 1-220 | 499 | DEX0378_29.aa.12 |
| 185 | DEX0378_29.nt.26 | 17p12 | 1-220 | 499 | DEX0378_29.aa.12 |
| 186 | DEX0378_29.nt.27 | 17p12 | 1-220 | 499 | DEX0378_29.aa.12 |
| 187 | DEX0378_29.nt.28 | 17p12 | 1-406 | 500 | DEX0378_29.aa.19 |
| 188 | DEX0378_29.nt.29 | 17p12 | 1-220 | 499 | DEX0378_29.aa.12 |
| 189 | DEX0378_29.nt.30 | 17p12 | 1-220 | 499 | DEX0378_29.aa.12 |
| 190 | DEX0378_30.nt.1 | 1q44 | | 501 | DEX0378_30.aa.1 |
| 191 | DEX0378_30.nt.2 | 1q44 | — | | |
| 192 | DEX0378_31.nt.1 | 19p13.3 | | 502 | DEX0378_31.aa.1 |
| 193 | DEX0378_32.nt.1 | 18q21.2 | | 503 | DEX0378_32.aa.1 |
| 194 | DEX0378_33.nt.1 | 10q21.1 | | 504 | DEX0378_33.aa.1 |
| 195 | DEX0378_33.nt.2 | 10q21.1 | | | |
| 196 | DEX0378_33.nt.3 | 10q21.1 | — | | |
| 197 | DEX0378_34.nt.1 | 7q11.23 | | 505 | DEX0378_34.aa.1 |
| 198 | DEX0378_34.nt.2 | 7q11.23 | | | |
| 199 | DEX0378_34.nt.3 | * | | 506 | DEX0378_34.aa.3 |
| 200 | DEX0378_34.nt.4 | 7q11.23 | 270-594 | 507 | DEX0378_34.aa.4 |
| 201 | DEX0378_34.nt.5 | 7q11.23 | 233-557 | 507 | DEX0378_34.aa.4 |
| 202 | DEX0378_35.nt.1 | 1p13.3 | | 508 | DEX0378_35.aa.1 |
| 203 | DEX0378_35.nt.2 | 1p13.3 | — | | |
| 204 | DEX0378_35.nt.3 | 1p13.3 | — | | |
| 205 | DEX0378_36.nt.1 | 4q31.21 | | 509 | DEX0378_36.aa.1 |
| 206 | DEX0378_36.nt.2 | 4q31.21 | — | | |
| 207 | DEX0378_37.nt.1 | 7p22.3 | | 510 | DEX0378_37.aa.1 |
| 208 | DEX0378_37.nt.2 | 7p22.3 | | | |
| 209 | DEX0378_37.nt.3 | 7p22.3 | 1-408 | 511 | DEX0378_37.aa.3 |
| 210 | DEX0378_37.nt.4 | 7p22.3 | 1-408 | 511 | DEX0378_37.aa.3 |
| 211 | DEX0378_37.nt.5 | 7p22.3 | — | | |
| 212 | DEX0378_37.nt.6 | 7p22.3 | — | | |
| 213 | DEX0378_37.nt.7 | 7p22.3 | 1-408 | 511 | DEX0378_37.aa.3 |
| 214 | DEX0378_37.nt.8 | 7p22.3 | — | | |
| 215 | DEX0378_37.nt.9 | 7p22.3 | — | | |
| 216 | DEX0378_37.nt.10 | 7p22.3 | 1-408 | 511 | DEX0378_37.aa.3 |
| 217 | DEX0378_38.nt.1 | 13q13.3 | | 512 | DEX0378_38.aa.1 |
| 218 | DEX0378_38.nt.2 | 13q13.3 | — | | |
| 219 | DEX0378_38.nt.3 | 13q13.3 | — | | |
| 220 | DEX0378_39.nt.1 | 2q23.3 | | 513 | DEX0378_39.aa.1 |
| 221 | DEX0378_39.nt.2 | 2q23.3 | — | | |
| 222 | DEX0378_40.nt.1 | 22q12.1 | | 514 | DEX0378_40.aa.1 |
| 223 | DEX0378_40.nt.2 | 22q12.1 | — | | |
| 224 | DEX0378_41.nt.1 | 10q21.2 | | 515 | DEX0378_41.aa.1 |
| 225 | DEX0378_41.nt.2 | 10q21.2 | — | | |
| 226 | DEX0378_42.nt.1 | 6q25.3 | | 516 | DEX0378_42.aa.1 |
| 227 | DEX0378_42.nt.2 | 6q25.3 | | | |
| 228 | DEX0378_42.nt.3 | 6q25.3 | | 517 | DEX0378_42.aa.3 |
| 229 | DEX0378_42.nt.4 | 6q25.3 | | | |
| 230 | DEX0378_42.nt.5 | 6q25.3 | — | | |
| 231 | DEX0378_42.nt.6 | 6q25.3 | — | | |
| 232 | DEX0378_42.nt.7 | 6q25.3 | 283-1118 | 518 | DEX0378_42.aa.7 |
| 233 | DEX0378_42.nt.8 | 6q25.3 | 1723-2155 | 519 | DEX0378_42.aa.8 |
| 234 | DEX0378_42.nt.9 | 6q25.3 | 547-904 | 520 | DEX0378_42.aa.9 |
| 235 | DEX0378_42.nt.10 | 6q25.3 | 74-1145 | 521 | DEX0378_42.aa.10 |
| 236 | DEX0378_43.nt.1 | 1q22 | | | |
| 237 | DEX0378_43.nt.2 | 1q22 | 28-387 | 522 | DEX0378_43.aa.2 |
| 238 | DEX0378_43.nt.3 | 1q22 | — | | |
| 239 | DEX0378_43.nt.4 | 1q22 | 72-4773 | 523 | DEX0378_43.aa.4 |
| 240 | DEX0378_43.nt.5 | 1q22 | 10-3197 | 524 | DEX0378_43.aa.5 |
| 241 | DEX0378_43.nt.6 | 1q22 | 1993-5233 | 525 | DEX0378_43.aa.6 |
| 242 | DEX0378_43.nt.7 | 1q22 | 1993-5467 | 526 | DEX0378_43.aa.7 |
| 243 | DEX0378_43.nt.8 | 1q22 | — | | |
| 244 | DEX0378_43.nt.9 | 1q22 | 72-1662 | 527 | DEX0378_43.aa.9 |
| 245 | DEX0378_43.nt.10 | 1q22 | 72-1662 | 527 | DEX0378_43.aa.9 |
| 246 | DEX0378_43.nt.11 | 1q22 | 342-747 | 528 | DEX0378_43.aa.11 |
| 247 | DEX0378_43.nt.12 | 1q22 | 1993-5302 | 529 | DEX0378_43.aa.12 |
| 248 | DEX0378_43.nt.13 | 1q22 | 1993-4348 | 530 | DEX0378_43.aa.13 |
| 249 | DEX0378_43.nt.14 | 1q22 | 72-1662 | 527 | DEX0378_43.aa.9 |
| 250 | DEX0378_43.nt.15 | 1q22 | 72-1662 | 527 | DEX0378_43.aa.9 |
| 251 | DEX0378_44.nt.1 | 9p22.3 | | | |
| 252 | DEX0378_44.nt.2 | 9p22.3 | — | | |
| 253 | DEX0378_45.nt.1 | 3q13.31 | | 531 | DEX0378_45.aa.1 |
| 254 | DEX0378_45.nt.2 | 3q13.31 | — | | |
| 255 | DEX0378_46.nt.1 | 6q25.3 | | 532 | DEX0378_46.aa.1 |
| 256 | DEX0378_46.nt.2 | 6q25.3 | — | | |
| 257 | DEX0378_47.nt.1 | 19p13.3 | | 533 | DEX0378_47.aa.1 |
| 258 | DEX0378_47.nt.2 | 19p13.3 | — | | |
| 259 | DEX0378_48.nt.1 | 5q33.1 | | 534 | DEX0378_48.aa.1 |
| 260 | DEX0378_48.nt.2 | 5q33.1 | | | |
| 261 | DEX0378_48.nt.3 | 5q33.1 | — | | |
| 262 | DEX0378_48.nt.4 | 5q33.1 | — | | |
| 263 | DEX0378_49.nt.1 | 15q22.31 | | 535 | DEX0378_49.aa.1 |
| 264 | DEX0378_49.nt.2 | *18q21.1 | — | | |
| 265 | DEX0378_50.nt.1 | 14q24.1 | | 536 | DEX0378_50.aa.1 |
| 266 | DEX0378_50.nt.2 | 14q24.1 | | | |
| 267 | DEX0378_50.nt.3 | 14q24.1 | — | | |
| 268 | DEX0378_51.nt.1 | 2q23.2 | | 537 | DEX0378_51.aa.1 |
| 269 | DEX0378_52.nt.1 | 9q34.3 | | 538 | DEX0378_52.aa.1 |
| 270 | DEX0378_52.nt.2 | 9q34.3 | — | | |
| 271 | DEX0378_52.nt.3 | 9q34.3 | — | | |
| 272 | DEX0378_53.nt.1 | 1p13.3 | | 539 | DEX0378_53.aa.1 |
| 273 | DEX0378_53.nt.2 | 1p13.3 | | | |
| 274 | DEX0378_53.nt.3 | 1p13.3 | — | | |
| 275 | DEX0378_54.nt.1 | 10q24.31 | | 540 | DEX0378_54.aa.1 |
| 276 | DEX0378_54.nt.2 | 10q24.31 | — | | |
| 277 | DEX0378_55.nt.1 | 13q32.1 | | 541 | DEX0378_55.aa.1 |
| 278 | DEX0378_55.nt.2 | 13q32.1 | | | |
| 279 | DEX0378_55.nt.3 | 13q32.1 | 847-1969 | 542 | DEX0378_55.aa.3 |
| 280 | DEX0378_55.nt.4 | 13q32.1 | 847-2005 | 543 | DEX0378_55.aa.4 |
| 281 | DEX0378_55.nt.5 | 13q32.1 | 45-360 | 544 | DEX0378_55.aa.5 |
| 282 | DEX0378_55.nt.6 | 13q32.1 | — | | |
| 283 | DEX0378_55.nt.7 | 13q32.1 | — | | |
| 284 | DEX0378_55.nt.8 | 13q32.1 | — | | |
| 285 | DEX0378_55.nt.9 | 13q32.1 | 847-1969 | 542 | DEX0378_55.aa.3 |
| 286 | DEX0378_55.nt.10 | 13q32.1 | 847-1258 | 545 | DEX0378_55.aa.10 |
| 287 | DEX0378_55.nt.11 | 13q32.1 | — | | |
| 288 | DEX0378_55.nt.12 | 13q32.1 | 25-285 | 546 | DEX0378_55.aa.12 |
| 289 | DEX0378_55.nt.13 | 13q32.1 | 847-1915 | 547 | DEX0378_55.aa.13 |
| 290 | DEX0378_55.nt.14 | 13q32.1 | 722-1244 | 548 | DEX0378_55.aa.14 |
| 291 | DEX0378_55.nt.15 | 13q32.1 | 847-1963 | 549 | DEX0378_55.aa.15 |
| 292 | DEX0378_55.nt.16 | 13q32.1 | 847-1930 | 550 | DEX0378_55.aa.16 |
| 293 | DEX0378_56.nt.1 | 17p13.2 | | 551 | DEX0378_56.aa.1 |
| 294 | DEX0378_56.nt.2 | 17p13.2 | — | | |
| 295 | DEX0378_56.nt.3 | 17p13.2 | — | | |
| 296 | DEX0378_56.nt.4 | 17p13.2 | — | | |
| 297 | DEX0378_56.nt.5 | 17p13.2 | — | | |
| 298 | DEX0378_56.nt.6 | 17p13.2 | — | | |
| 299 | DEX0378_57.nt.1 | 4q24 | | 552 | DEX0378_57.aa.1 |
| 300 | DEX0378_57.nt.2 | 4q24 | — | | |
| 301 | DEX0378_58.nt.1 | 10p12.1 | | 553 | DEX0378_58.aa.1 |
| 302 | DEX0378_58.nt.2 | 10p12.1 | — | | |
| 303 | DEX0378_58.nt.3 | 10p12.1 | — | | |
| 304 | DEX0378_59.nt.1 | 1q32.1 | | 554 | DEX0378_59.aa.1 |
| 305 | DEX0378_59.nt.2 | 1q32.1 | | | |
| 306 | DEX0378_59.nt.3 | 1q32.1 | — | | |
| 307 | DEX0378_59.nt.4 | 1q32.1 | 105-590 | 555 | DEX0378_59.aa.4 |
| 308 | DEX0378_59.nt.5 | 1q32.1 | 1-447 | 556 | DEX0378_59.aa.5 |
| 309 | DEX0378_59.nt.6 | 1q32.1 | — | | |
| 310 | DEX0378_59.nt.7 | 1q32.1 | 49-532 | 557 | DEX0378_59.aa.7 |
| 311 | DEX0378_59.nt.8 | 1q32.1 | 1-296 | 558 | DEX0378_59.aa.8 |
| 312 | DEX0378_59.nt.9 | 1q32.1 | 217-700 | 557 | DEX0378_59.aa.7 |
| 313 | DEX0378_60.nt.1 | 22q12.3 | | 559 | DEX0378_60.aa.1 |
| 314 | DEX0378_60.nt.2 | 22q12.3 | 86-268 | 560 | DEX0378_60.aa.2 |
| 315 | DEX0378_61.nt.1 | 9p21.2 | | 561 | DEX0378_61.aa.1 |
| 316 | DEX0378_61.nt.2 | 9p21.2 | — | | |
| 317 | DEX0378_62.nt.1 | 2p25.2 | | 562 | DEX0378_62.aa.1 |
| 318 | DEX0378_62.nt.2 | 2p25.2 | 60-516 | 563 | DEX0378_62.aa.2 |
| 319 | DEX0378_63.nt.1 | 14q31.3 | | 564 | DEX0378_63.aa.1 |
| 320 | DEX0378_63.nt.2 | 14q31.3 | | | |
| 321 | DEX0378_63.nt.3 | 14q31.3 | — | | |
| 322 | DEX0378_63.nt.4 | 14q31.3 | — | | |
| 323 | DEX0378_64.nt.1 | 22q13.2 | | | |
| 324 | DEX0378_64.nt.2 | 22q13.2 | 1224-2772 | 565 | DEX0378_64.aa.2 |
| 325 | DEX0378_64.nt.3 | 22q13.2 | 307-1855 | 566 | DEX0378_64.aa.3 |
| 326 | DEX0378_64.nt.4 | 22q13.2 | — | | |
| 327 | DEX0378_64.nt.5 | 22q13.2 | — | | |
| 328 | DEX0378_64.nt.6 | 22q13.2 | 1340-2888 | 565 | DEX0378_64.aa.2 |
| 329 | DEX0378_64.nt.7 | 22q13.2 | 1658-3206 | 565 | DEX0378_64.aa.2 |
| 330 | DEX0378_64.nt.8 | 22q13.2 | 129-1677 | 565 | DEX0378_64.aa.2 |
| 331 | DEX0378_64.nt.9 | 22q13.2 | — | | |
| 332 | DEX0378_64.nt.10 | 22q13.2 | 1-311 | 567 | DEX0378_64.aa.10 |
| 333 | DEX0378_65.nt.1 | 1p13.2 | | 568 | DEX0378_65.aa.1 |
| 334 | DEX0378_65.nt.2 | 1p13.2 | — | | |
| 335 | DEX0378_66.nt.1 | 22q13.31 | | 569 | DEX0378_66.aa.1 |
| 336 | DEX0378_66.nt.2 | 22q13.31 | | | |
| 337 | DEX0378_66.nt.3 | 22q13.31 | — | | |
| 338 | DEX0378_67.nt.1 | 3q22.1 | | 570 | DEX0378_67.aa.1 |
| 339 | DEX0378_67.nt.2 | 3q22.1 | | | |
| 340 | DEX0378_67.nt.3 | 3q22.1 | — | | |
| 341 | DEX0378_68.nt.1 | 4q34.1 | | 571 | DEX0378_68.aa.1 |
| 342 | DEX0378_68.nt.2 | 4q34.1 | | | |
| 343 | DEX0378_68.nt.3 | 4q34.1 | — | | |
| 344 | DEX0378_69.nt.1 | 18q22.3 | | 572 | DEX0378_69.aa.1 |
| 345 | DEX0378_69.nt.2 | 18q22.3 | — | | |
| 346 | DEX0378_70.nt.1 | 2p16.3 | | 573 | DEX0378_70.aa.1 |
| 347 | DEX0378_70.nt.2 | 2p16.3 | — | | |
| 348 | DEX0378_70.nt.3 | 2p16.3 | — | | |
| 349 | DEX0378_70.nt.4 | 2p16.3 | — | | |
| 350 | DEX0378_70.nt.5 | 2p16.3 | — | | |
| 351 | DEX0378_70.nt.6 | 2p16.3 | — | | |
| 352 | DEX0378_70.nt.7 | 2p16.3 | 174-2694 | 574 | DEX0378_70.aa.7 |
| 353 | DEX0378_70.nt.8 | 2p16.3 | — | | |
| 354 | DEX0378_70.nt.9 | 2p16.3 | — | | |
| 355 | DEX0378_70.nt.10 | 2p16.3 | — | | |
| 356 | DEX0378_70.nt.11 | 2p16.3 | — | | |
| 357 | DEX0378_70.nt.12 | 2p16.3 | — | | |
| 358 | DEX0378_70.nt.13 | 2p16.3 | 1-481 | 575 | DEXO378_70.aa.13 |
| 359 | DEX0378_70.nt.14 | 2p16.3 | — | | |
| 360 | DEX0378_70.nt.15 | 2p16.3 | — | | |
| 361 | DEX0378_70.nt.16 | 2p16.3 | — | | |
| 362 | DEX0378_70.nt.17 | 2p16.3 | 174-1020 | 576 | DEX0378_70.aa.17 |
| 363 | DEX0378_70.nt.18 | 2p16.3 | 132-534 | 577 | DEX0378_70.aa.18 |
| 364 | DEX0378_71.nt.1 | 14q24.1 | | 578 | DEX0378_71.aa.1 |
| 365 | DEX0378_71.nt.2 | 14q24.1 | | | |
| 366 | DEX0378_71.nt.3 | 14q24.1 | — | | |
| 367 | DEX0378_71.nt.4 | 14q24.1 | — | | |
| 368 | DEX0378_72.nt.1 | 7q33 | | | |
| 369 | DEX0378_72.nt.2 | 7q33 | — | | |
| 370 | DEX0378_73.nt.1 | 7q21.3 | | 579 | DEX0378_73.aa.1 |
| 371 | DEX0378_73.nt.2 | *7q21.3 | — | | |
| 372 | DEX0378_74.nt.1 | 13q13.3 | | 580 | DEX0378_74.aa.1 |
| 373 | DEX0378_74.nt.2 | 13q13.3 | — | | |
| 374 | DEX0378_75.nt.1 | 9q33.2 | | 581 | DEX0378_75.aa.1 |
| 375 | DEX0378_75.nt.2 | 9q33.2 | — | | |
| 376 | DEX0378_76.nt.1 | 13q12.2 | | 582 | DEX0378_76.aa.1 |
| 377 | DEX0378_76.nt.2 | 13q12.2 | — | | |
| 378 | DEX0378_77.nt.1 | 14q32.12 | | | |
| 379 | DEX0378_77.nt.2 | 14q32.12 | — | | |
| 380 | DEX0378_78.nt.1 | 6p21.31 | | | |
| 381 | DEX0378_78.nt.2 | 6p21.31 | — | | |
| 382 | DEX0378_79.nt.1 | 3q22.3 | | | |
| 383 | DEX0378_79.nt.2 | 3q22.3 | | | |
| 384 | DEX0378_79.nt.3 | 3q22.3 | — | | |
| 385 | DEX0378_80.nt.1 | 8q22.2 | | 583 | DEX0378_80.aa.1 |
| 386 | DEX0378_80.nt.2 | 8q22.2 | | | |
| 387 | DEX0378_80.nt.3 | 8q22.2 | 685-1489 | 584 | DEX0378_80.aa.3 |
| 388 | DEX0378_80.nt.4 | 8q22.2 | 1-325 | 585 | DEX0378_80.aa.4 |
| 389 | DEX0378_80.nt.5 | 8q22.2 | 40-831 | 586 | DEX0378_80.aa.5 |
| 390 | DEX0378_81.nt.1 | 10q23.31 | | 587 | DEX0378_81.aa.1 |
| 391 | DEX0378_82.nt.1 | 3p13 | | 588 | DEX0378_82.aa.1 |
| 392 | DEX0378_82.nt.2 | 3p13 | — | | |
| 393 | DEX0378_83.nt.1 | 19q12 | | 589 | DEX0378_83.aa.1 |
| 394 | DEX0378_83.nt.2 | 19q12 | — | | |
| 395 | DEX0378_84.nt.1 | 12p13.31 | | 590 | DEX0378_84.aa.1 |
| 396 | DEX0378_84.nt.2 | 12p13.31 | — | | |
| 397 | DEX0378_85.nt.1 | 7q36.2 | | 591 | DEX0378_85.aa.1 |
| 398 | DEX0378_85.nt.2 | 7q36.2 | 164-398 | 592 | DEX0378_85.aa.2 |
| 399 | DEX0378_86.nt.1 | 4q24 | | | |
| 400 | DEX0378_86.nt.2 | 4q24 | | | |
| 401 | DEX0378_86.nt.3 | 4q24 | — | | |
| 402 | DEX0378_87.nt.1 | 14q22.1 | | 593 | DEX0378_87.aa.1 |
| 403 | DEX0378_87.nt.2 | 14q22.1 | — | | |
| 404 | DEX0378_88.nt.1 | 4q26 | | 594 | DEX0378_88.aa.1 |
| 405 | DEX0378_88.nt.2 | 4q26 | — | | |
| 406 | DEX0378_89.nt.1 | 6q24.1 | | 595 | DEX0378_89.aa.1 |
| 407 | DEX0378_90.nt.1 | 20q13.32 | | 596 | DEX0378_90.aa.1 |
| 408 | DEX0378_91.nt.1 | 17q11.2 | | | |
| 409 | DEX0378_92.nt.1 | * | | | |
| 410 | DEX0378_93.nt.1 | * | | | |
| 411 | DEX0378_94.nt.1 | 14q31.3 | | 597 | DEX0378_94.aa.1 |
| 412 | DEX0378_95.nt.1 | 10q23.31 | | | |
| 413 | DEX0378_96.nt.1 | 14q22.1 | | 598 | DEX0378_96.aa.1 |
| 414 | DEX0378_97.nt.1 | 15q22.2 | | | |
| 415 | DEX0378_98.nt.1 | Xq13.1 | | | |
| 416 | DEX0378_99.nt.1 | 1p35.2 | | 599 | DEX0378_99.aa.1 |
| 417 | DEX0378_100.nt.1 | 8q13.2 | | | |
| 418 | DEX0378_101.nt.1 | * | | | |
| 419 | DEX0378_102.nt.1 | 3p25.2 | | 600 | DEX0378_102.aa.1 |

[0434] For the polypeptides of the invention, the following attributes were found, epitopes, post translational modifications, signal peptides and transmembrane domains. Antigenicity (Epitope) prediction was performed through the antigenic module in the EMBOSS package. Rice, P., EMBOSS: The European Molecular Biology Open Software Suite, Trends in Genetics 16(6): 276-277 (2000). The antigenic module predicts potentially antigenic regions of a protein sequence, using the method of Kolaskar and Tongaonkar. Kolaskar, AS and Tongaonkar, PC., A semi-empirical method for prediction of antigenic determinants on protein antigens, FEBS Letters 276: 172-174 (1990). Examples of post-translational modifications (PTMs) and other motifs of the ESPs of this invention are listed below. In addition, antibodies that specifically bind such post-translational modifications may be useful as a diagnostic or as therapeutic. The PTMs and other motifs were predicted by using the ProSite Dictionary of Proteins Sites and Patterns (Bairoch et al., Nucleic Acids Res. 25(1):217-221 (1997)), the following motifs, including PTMs, were predicted for the ESPs of the invention. The signal peptides were detected by using the SignalP 2.0, see Nielsen et al., Protein Engineering 12, 3-9 (1999). Prediction of transmembrane helices in proteins was performed by the application TMHMM 2.0, “currently the best performing transmembrane prediction program”, according to authors (Krogh et al., Journal of Molecular Biology, 305(3):567-580, (2001); Moller et al., Bioinformatics, 17(7):646-653, (2001); Sonnhammer, et al., A hidden Markov model for predicting transmembrane helices in protein sequences in Glasgow, et al. Ed. Proceedings of the Sixth International Conference on Intelligent Systems for Molecular Biology, pages 175-182, Menlo Park, Calif., 1998. AAAI Press. The PSORT II program may also be used to predict cellular localizations. Horton et al., Intelligent Systems for Molecular Biology 5: 147-152 (1997). The table below includes the following sequence annotations: Signal peptide presence; TM (number of membrane domain, topology in orientation and position); Amino acid location and antigenic index (location, AI score, length); PTM and other motifs (type, amino acid residue locations).

| SequenceID | Signal P | TMHMM | Antigenicity | PTM |
|---|---|---|---|---|
| DEX0378_5.aa.4 | N | 0 - o | 17-54, 1.179; 57-71, | Camp_Phospho_Site 80-83, |
| | | | 1.161; 97-109, | 99-102; |
| | | | 1.129 | Ck2_Phospho_Site 19-22; |
| | | | | Myristyl 23-28; |
| | | | | Pkc_Phospho_Site 19-21, |
| | | | | 75-77, 93-95; |
| DEX0378_5.aa.5 | N | 5 - o32- | 5-81, 1.303; 149-208, | Ck2_Phospho_Site 9-12, |
| | | 49i56- | 1.22; 100-142, | 31-34, 117-120, |
| | | 75o119- | 1.171 | 213-216; Myristyl 19-24, |
| | | 141i154- | | 98-103, 153-158; |
| | | 176o191- | | Pkc_Phospho_Site 82-84, |
| | | 210i | | 180-182, 192-194; |
| DEX0378_5.aa.6 | Y | 0 - o | 112-131, 1.216; | Asn_Glycosylation |
| | | | 65-73, 1.208; 10-33 | 137-140; |
| | | | 1.181; 37-52, | Ck2_Phospho_Site 13-16, |
| | | | 1.179; 87-93 | 34-37, 106-109, |
| | | | 1.103; 153-160, | 155-158; Myristyl 82-87, |
| | | | 1.03 | 103-108, 140-145; |
| | | | | Pkc_Phospho_Site 7-9, |
| | | | | 58-60, 163-165; |
| | | | | Prokar_Lipoprotein |
| | | | | 119-129; |
| DEX0378_5.aa.8 | N | 0 - o | 108-129, 1.213; | Asn_Glycosylation 20-23; |
| | | | 49-84, 1.198; 4-19, | Ck2_Phospho_Site |
| | | | 1.196; 87-106, | 22-25, 42-45, 89-92, |
| | | | 1.155; 23-32, | 134-137; Myristyl 51-56, |
| | | | 1.154 | 55-60, 102-107; |
| | | | | Pkc_Phospho_Site 113-115; |
| DEX0378_5.aa.9 | N | 0 - o | 10-16, 1.058; 26-32, | Ck2_Phospho_Site 33-36; |
| | | | 1.041 | Myriatyl 29-34; |
| | | | | Pkc_Phospho_Site 12-14, |
| | | | | 33-35; |
| DEX0378_6.aa.3 | N | 0 - o | 38-77, 1.225; 87-116, | Asn_Glycosylation 56-59; |
| | | | 1.142; 22-35, | Myristyl 11-16, |
| | | | 1.116; 124-136 | 35-40, 39-44, 88-93, |
| | | | 1.108 | 90-95; |
| | | | | Pkc_Phospho_Site 5-7; |
| | | | | Prokar_Lipoprotein |
| | | | | 63-73; |
| DEX0378_9.aa.3 | N | 0 - o | 92-104, 1.177; | Amidation 74-77; |
| | | | 26-47, 1.171; 73-89, | Camp_Phospho_Site 19-22, |
| | | | 1.162; 61-68, | 77-80; |
| | | | 1.141; 111-123, | Glycosaminoglycan 24-27; |
| | | | 1.093; 4-12, | Pkc_Phospho_Site |
| | | | 1.084 | 18-20, 130-132; |
| DEX0378_9.aa.4 | y | 4 - i30- | 95-146, 1.197; | Asn_Glycosylation 31-34; |
| | | 49o54- | 28-78, 1.195; 84-93, | Pkc_Phospho_Site |
| | | 76i89- | 1.147 | 13-15, 32-34, 88-90, |
| | | 111o121- | | 118-120; |
| | | 143i | | Tyr_Phospho_Site 90-96, |
| | | | | 120-127; |
| DEX0378_9.aa.6 | y | 3 - o48- | 5-15, 1.224; 26-72, | Glycosaminoglycan 3-6; |
| | | 70i83- | 1.195; 89-140, | Myristyl 5-10; |
| | | 105o120- | 1.181; 78-87, | Pkc_Phospho_Site 82-84, |
| | | 142i | 1.147 | 112-114; |
| | | | | Tyr_Phospho_Site 84-90, |
| | | | | 114-121; |
| | | | | Prokar_Lipoprotein 3-13; |
| DEX0378_9.aa.8 | y | 4 - i30- | 28-78, 1.195; 95-146, | Asn_Glycosylation 31-34; |
| | | 49o54- | 1.181; 84-93 | Pkc_Phospho_Site |
| | | 76i89- | 1.147 | 13-15, 32-34, 88-90, |
| | | 111o126- | | 118-120; |
| | | 148i | | Tyr_Phospho _Site 90-96, |
| | | | | 120-127; |
| DEX0378_9.aa.20 | N | 0 - o | 5-15, 1.224; 82-102, | Amidation 63-66; |
| | | | 1.186; 109-118, | Camp_Phospho_Site 32-35, |
| | | | 1.18; 40-57, | 65-68; |
| | | | 1.101; 29-35, | Glycosaminoglycan 3-6; |
| | | | 1.052 | Myristyl 5-10, 41-46; |
| | | | | Pkc_Phospho_Site |
| | | | | 128-130; |
| | | | | Prokar_Lipoprotein 3-13; |
| DEX0378_9.aa.21 | y | 2 - i20- | 13-46, 1.264; | Asn_Glycosylation |
| | | 42o386- | 141-152, 1.236; | 208-211; |
| | | 408i | 362-417, 1.212; | Camp_Phospho_Site 86-89, |
| | | | 481-503, 1.204; | 346-349; |
| | | | 327-343, 1.192; | Ck2_Phospho_Site 63-66, |
| | | | 157-193, 1.189; | 190-193, 238-241, |
| | | | 287-300, 1.176; | 310-313, 311-314; |
| | | | 218-242, 1.169; | Myristyl 71-76, 156-161, |
| | | | 85-92, 1.138; | 166-171, 222-227, |
| | | | 244-269, 1.137; | 249-254, 267-272, 268-273, |
| | | | 273-281, 1.132; | 275-280, 277-282, |
| | | | 98-107, 1.131; | 290-295, 456-461, 459-464, |
| | | | 307-324, 1.127; | 483-488; |
| | | | 427-440, 1.119; | Pkc_Phospho_Site 50-52, |
| | | | 345-358, 1.116; | 100-102, 114-116, |
| | | | 129-138, 1.108; | 344-346, 350-352; |
| | | | 196-205, 1.105; | Prokar_Lipoprotein |
| | | | 460-479, 1.095; | 271-281; |
| | | | 419-425, 1.077; | |
| | | | 109-115, 1.044; | |
| | | | 209-215, 1.035 | |
| DEX0378_9.aa.22 | Y | 0 - o | 4-25, 1.228; 112-132, | Myristyl 34-39, 98-103, |
| | | | 1.183; 35-55, | 112-117, 115-120; |
| | | | 1.152; 65-72, | Pkc_Phospho_Site 140-142; |
| | | | 1.11; 76-82, | Prokar_Lipoprotein |
| | | | 1.088; 98-106, | 110-120; |
| | | | 1.077 | Receptor Cytokines_1 |
| | | | | 73-86; |
| DEX0378_9.aa.24 | N | 0 - o | 82-122, 1.237; | Ck2_Phospho_Site 108-111, |
| | | | 133-153, 1.167; | 148-151; Myristyl |
| | | | 9-28, 1.167; 40-61, | 35-40; |
| | | | 1.118; 70-77, | Pkc_Phospho_Site 26-28, |
| | | | 1.106 | 69-71; |
| DEX0378_9.aa.25 | N | 1 - o67- | 43-98, 1.212; | Camp_Phospho_Site 27-30, |
| | | 89i | 162-184, 1.204; | Myristyl 137-142, |
| | | | 8-24, 1.192; 108-121, | 140-145, 164-169; |
| | | | 1.119; 26-39, | Pkc_Phospho_Site 25-27, |
| | | | 1.116; 141-160, | 31-33; |
| | | | 1.095; 100-106, | |
| | | | 1.077 | |
| DEX0378_9.aa.26 | N | 0 - o | 4-13, 1.168; 15-31, | |
| | | | 1.147 | |
| DEX0378_10.aa.5 | N | 0 - o | 78-104, 1.174; | Asn_Glycosylation |
| | | | 146-180, 1.172; | 211-214, 248-251; |
| | | | 108-115, 1.122; | Ck2_Phospho_Site 71-74, |
| | | | 314-321, 1.119; | 105-108, 121-124, |
| | | | 33-53, 1.113; | 142-145, 199-202, 201-204, |
| | | | 289-301, 1.104; | 264-267, 265-268; |
| | | | 120-127, 1.1; 5-11, | Glycosaminoglycan |
| | | | 1.068; 252-258, | 380-383; Myristyl 17-22, |
| | | | 1.065; 131-138, | 23-28, 69-74, 110-115, |
| | | | 1.038 | 113-118, 197-202, |
| | | | | 239-244, 255-260, 357-362, |
| | | | | 381-386, 383-388; |
| | | | | Pkc_Phospho_Site 105-107, |
| | | | | 227-229, 343-345; |
| | | | | Tyr_Phospho_Site 7-14, |
| | | | | 77-84, 78-84; |
| DEX0378_10.aa.6 | y | 0 - o | 16-39, 1.174; 81-115, | Asn_Glycosylation |
| | | | 1.172; 43-50, | 146-149, 183-186; |
| | | | 1.122; 249-256, | Ck2_Phospho_Site 40-43, |
| | | | 1.119; 349-362, | 56-59, 77-80, 134-137, |
| | | | 1.105; 224-236, | 136-139, 199-202, |
| | | | 1.104; 55-62, | 200-203; Myristyl 45-50, |
| | | | 1.1; 336-346, | 48-53, 132-137, |
| | | | 1.089; 187-193, | 174-179, 190-195, 292-297, |
| | | | 1.065; 66-73, | 324-329, 328-333, |
| | | | 1.038 | 377-382; |
| | | | | Pkc_Phospho_Site 15-17, |
| | | | | 40-42, 162-164, |
| | | | | 278-280; |
| DEX0378_10.aa.7 | N | 0 - o | 76-102, 1.174; | Asn_Glycosylation |
| | | | 144-178, 1.172; | 209-212, 246-249; |
| | | | 106-113, 1.122; | Ck2_Phospho_Site 69-72, |
| | | | 312-319, 1.119; | 103-106, 119-122, |
| | | | 31-51, 1.113; | 140-143, 197-200, 199-202, |
| | | | 287-299, 1.104; | 262-265, 263-266; |
| | | | 118-125, 1.1; | Glycosaminoglycan |
| | | | 250-256, 1.065; | 378-381; Myristyl 15-20, |
| | | | 129-136, 1.038 | 21-26, 67-72, 108-113, |
| | | | | 111-116, 195-200, |
| | | | | 237-242, 253-258, 355-360, |
| | | | | 379-384, 381-386; |
| | | | | Pkc_Phospho_Site 103-105, |
| | | | | 225-227, 341-343; |
| | | | | Tyr_Phospho_Site 75-82, |
| | | | | 76-82; |
| DEX0378_10.aa.8 | N | 0 - o | 94-120, 1.174; | Asn_Glycosylation |
| | | | 162-196, 1.172; | 227-230, 264-267; |
| | | | 124-131, 1.122; | Ck2_Phospho_Site 87-90, |
| | | | 330-337, 1.119; | 121-124, 137-140, |
| | | | 49-69, 1.113; | 158-161, 215-218, 217-220, |
| | | | 305-317, 1.104; | 280-283, 281-284; |
| | | | 136-143, 1.1; 9-27, | Glycosaminoglycan |
| | | | 1.095; 268-274, | 396-399; Myristyl 33-38, |
| | | | 1.065; 147-154, | 39-44, 85-90, 126-131, |
| | | | 1.038 | 129-134, 213-218, |
| | | | | 255-260, 271-276, 373-378, |
| | | | | 397-402, 399-404; |
| | | | | Pkc_Phospho_Site 121-123, |
| | | | | 243-245, 359-361; |
| | | | | Tyr_Phospho_Site 93-100, |
| | | | | 94-100; |
| DEX0378_10.aa.9 | N | 0 - o | 4-36, 1.172; 169-177, | Asn_Glycosylation 67-70, |
| | | | 1.119; 38-44, | 104-107; |
| | | | 1.105; 145-157, | Ck2_Phospho_Site 55-58, |
| | | | 1.104; 135-141, | 57-60, 120-123, |
| | | | 1.085; 184-191, | 121-124; |
| | | | 1.066; 108-114, | Glycosaminoglycan |
| | | | 1.065; 195-201, | 236-239; Myristyl 53-58, |
| | | | 1.06 | 95-100, 111-116, |
| | | | | 213-218, 237-242, 239-244; |
| | | | | Pkc_Phospho_Site |
| | | | | 83-85, 199-201; |
| DEX0378_10.aa.11 | N | 0 - o | 27-35, 1.119; 4-15, | Glycosaminoglycan 94-97; |
| | | | 1.104; 42-49, | Myristyl 71-76, |
| | | | 1.066; 53-59, | 95-100, 97-102; |
| | | | 1.06 | Pkc_Phospho_Site 57-59; |
| DEX0378_10.aa.13 | Y | 0 - o | 16-39, 1.174; 81-115, | Asn_Glycosylation |
| | | | 1.172; 43-50, | 146-149, 183-186; |
| | | | 1.122; 249-256, | Ck2_Phospho_Site 40-43, |
| | | | 1.119; 224-236, | 56-59, 77-80, 134-137, |
| | | | 1.104; 55-62, | 136-139, 199-202, |
| | | | 1.1; 187-193, | 200-203; |
| | | | 1.065; 66-73, | Glycosaminoglycan |
| | | | 1.038 | 315-318; Myristyl 45-50, |
| | | | | 48-53, 132-137, |
| | | | | 174-179, 190-195, 292-297, |
| | | | | 316-321, 318-323; |
| | | | | Pkc_Phospho_Site 15-17, |
| | | | | 40-42, 162-164, |
| | | | | 278-280; |
| DEX0378_10.aa.17 | Y | 0 - o | 16-39, 1.174; 81-115, | Asn_Glycosylation |
| | | | 1.172; 358-387, | 146-149, 183-186; |
| | | | 1.156; 43-50, | Ck2_Phospho_Site 40-43, |
| | | | 1.122; 249-256, | 56-59, 77-80, 134-137, |
| | | | 1.119; 224-236, | 136-139, 199-202, |
| | | | 1.104; 323-335, | 200-203; |
| | | | 1.102; 55-62, | Glycosaminoglycan |
| | | | 1.1; 348-354, | 315-318; Myristyl 45-50, |
| | | | 1.098; 187-193, | 48-53, 132-137, |
| | | | 1.065; 66-73, | 174-179, 190-195, 292-297, |
| | | | 1.038 | 316-321, 318-323; |
| | | | | Pkc_Phospho_Site 15-17, |
| | | | | 40-42, 162-164, |
| | | | | 278-280; |
| DEX0378_10.aa.18 | N | 0 - o | 33-53, 1.113; 5-11, | Ck2_Phospho_Site 71-74; |
| | | | 1.068 | Myristyl 17-22, |
| | | | | 23-28, 69-74; |
| | | | | Tyr_Phospho_Site 7-14, |
| | | | | 77-84, 78-84; |
| DEX0378_10.aa.22 | Y | 0 - o | 16-39, 1.174; 81-115, | Atp_Gtp_A 307-314; |
| | | | 1.172; 43-50, | Asn_Glycosylation |
| | | | 1.122; 249-256, | 146-149, 183-186; |
| | | | 1.119; 224-236, | Ck2_Phospho_Site 40-43, |
| | | | 1.104; 55-62, | 56-59, 77-80, 134-137, |
| | | | 1.1; 187-193, | 136-139, 199-202, |
| | | | 1.065; 66-73, | 200-203; Myristyl 45-50, |
| | | | 1.038 | 48-53, 132-137, |
| | | | | 174-179, 190-195, 292-297; |
| | | | | Pkc_Phospho_Site |
| | | | | 15-17, 40-42, 162-164, |
| | | | | 278-280; |
| DEX0378_10.aa.25 | N | 0 - o | 62-77, 1.119; 45-58, | Ck2_Phospho_Site 20-23, |
| | | | 1.104; 32-41, | 21-24; |
| | | | 1.085; 84-91, | Glycosaminoglycan |
| | | | 1.066; 8-14, | 136-139; Myristyl 11-16, |
| | | | 1.065; 95-101, | 113-118, 137-142, |
| | | | 1.06 | 139-144; |
| | | | | Pkc_Phospho_Site 99-101; |
| DEX0378_10.aa.28 | Y | 0 - o | 16-39, 1.174; 81-115, | Asn_Glycosylation |
| | | | 1.172; 43-50, | 146-149, 183-186; |
| | | | 1.122; 224-236, | Ck2_Phospho_Site 40-43, |
| | | | 1.104; 55-62, | 56-59, 77-80, 134-137, |
| | | | 1.1; 187-193, | 136-139, 199-202, |
| | | | 1.065; 66-73, | 200-203; Myristyl 45-50, |
| | | | 1.038 | 48-53, 132-137, |
| | | | | 174-179, 190-195; |
| | | | | Pkc_Phospho_Site 15-17, |
| | | | | 40-42, 162-164; |
| DEX0378_20.aa.3 | Y | 1 - | 793-817, 1.232; | Asn_Glycosylation 79-82, |
| | | 0793- | 744-756, 1.225; | 155-158, 251-254, |
| | | 815i | 14-34, 1.222; | 297-300, 323-326, 689-692; |
| | | | 104-125, 1.211; | Camp_Phospho_Site |
| | | | 686-715, 1.201; | 824-827; |
| | | | 927-955, 1.192; | Ck2_Phospho_Site 86-89, |
| | | | 36-57, 1.191; | 219-222, 275-278, |
| | | | 1080-1090, 1.189; | 325-328, 331-334, 375-378, |
| | | | 433-455, 1.185; | 384-387, 408-411, |
| | | | 832-847, 1.172; | 504-507, 543-546, 609-612, |
| | | | 327-349, 1.167; | 693-696, 710-713, |
| | | | 135-149, 1.165; | 739-742, 833-836, 853-856, |
| | | | 545-552, 1.164; | 941-944, 975-978, |
| | | | 1052-1069, 1.162; | 992-995, 1003-1006; |
| | | | 775-786, 1.159; | Leucine_Zipper 57-78, |
| | | | 260-277, 1.158; | 64-85; Myristyl 116-121, |
| | | | 303-317, 1.157; | 177-182, 186-191, |
| | | | 279-293, 1.148; | 190-195, 258-263, 282-287, |
| | | | 558-570, 1.147; | 354-359, 381-386, |
| | | | 585-601, 1.145; | 589-594, 673-678, 684-689, |
| | | | 476-500, 1.137; | 775-780, 795-800, |
| | | | 664-675, 1.137; | 866-871; |
| | | | 887-902, 1.137; | Pkc_Phospho_Site 197-199, |
| | | | 234-242, 1.133; | 361-363, 478-480, |
| | | | 574-581, 1.129; | 593-595, 614-616, 741-743, |
| | | | 615-623, 1.128; | 776-778, 823-825, |
| | | | 418-427, 1.128; | 855-857; |
| | | | 353-362, 1.127; | Tyr_Phospho_Site 668-675; |
| | | | 655-662, 1.125; | |
| | | | 461-473, 1.121; | |
| | | | 974-983, 1.117; | |
| | | | 187-195, 1.113; | |
| | | | 985-998, 1.113; | |
| | | | 1023-1031, 1.11; | |
| | | | 201-216, 1.106; | |
| | | | 378-390, 1.099; | |
| | | | 91-98, 1.098; | |
| | | | 871-883, 1.096; | |
| | | | 155-168, 1.096; | |
| | | | 1036-1044, 1.095; | |
| | | | 513-522, 1.084; | |
| | | | 59-66, 1.063; | |
| | | | 394-400, 1.06; | |
| | | | 1004-1010, 1.057; | |
| | | | 732-742, 1.049 | |
| DEX0378_20.aa.4 | N | 0 - o | 22-40, 1.129; 9-19, | Ck2_Phospho_Site 40-43; |
| | | | 1.084; 50-56, | Pkc_Phospho_Site |
| | | | 1.083 | 25-27; |
| DEX0378_20.aa.5 | Y | 1 - | 770-794, 1.232; | Asn_Glycosylation 79-82, |
| | | o770- | 721-733, 1.225; | 155-158, 228-231, |
| | | 792i | 14-34, 1.222; | 274-277, 300-303, 666-669; |
| | | | 104-125, 1.211; | Camp_Phospho_Site |
| | | | 663-692, 1.201; | 801-804; |
| | | | 904-932, 1.192; | Ck2_Phospho_Site 86-89, |
| | | | 36-57, 1.191; | 252-255, 302-305, |
| | | | 1057-1067, 1.189; | 308-311, 352-355, 361-364, |
| | | | 410-432, 1.185; | 385-388, 481-484, |
| | | | 809-824, 1.172; | 520-523, 586-589, 670-673, |
| | | | 304-326, 1.167; | 687-690, 716-719, |
| | | | 135-149, 1.165; | 810-813, 830-833, 918-921, |
| | | | 522-529, 1.164; | 952-955, 969-972, |
| | | | 1029-1046, 1.162; | 980-983; |
| | | | 752-763, 1.159; | Leucine_Zipper 57-78, |
| | | | 237-254, 1.158; | 64-85; Myristyl 116-121, |
| | | | 280-294, 1.157; | 177-182, 186-191, |
| | | | 256-270, 1.148; | 190-195, 235-240, 259-264, |
| | | | 535-547, 1.147; | 331-336, 358-363, |
| | | | 562-578, 1.145; | 566-571, 650-655, 661-666, |
| | | | 453-477, 1.137; | 752-757, 772-777, |
| | | | 641-652, 1.137; | 843-848; |
| | | | 864-879, 1.137; | Pkc_Phospho_Site 197-199, |
| | | | 211-219, 1.133; | 338-340, 455-457, |
| | | | 551-558, 1.129; | 570-572, 591-593, 718-720, |
| | | | 592-600, 1.128; | 753-755, 800-802, |
| | | | 395-404, 1.128; | 832-834; |
| | | | 330-339, 1.127; | Tyr_Phospho_Site 645-652; |
| | | | 632-639, 1.125; | |
| | | | 438-450, 1.121; | |
| | | | 951-960, 1.117; | |
| | | | 187-195, 1.113; | |
| | | | 962-975, 1.113; | |
| | | | 1000-1008, 1.11; | |
| | | | 355-367, 1.099; | |
| | | | 91-98, 1.098; | |
| | | | 848-860, 1.096; | |
| | | | 155-168, 1.096; | |
| | | | 1013-1021, 1.095; | |
| | | | 490-499, 1.084; | |
| | | | 59-66, 1.063; | |
| | | | 371-377, 1.06; | |
| | | | 981-987, 1.057; | |
| | | | 709-719, 1.049 | |
| DEX0378_20.aa.7 | Y | 0 - o | 14-34, 1.222; | Asn_Glycosylation 79-82, |
| | | | 104-125, 1.211; | 155-158, 251-254, |
| | | | 641-681, 1.201; | 297-300, 323-326; |
| | | | 36-57, 1.191; | Ck2_Phospho_Site 86-89, |
| | | | 433-455, 1.185; | 219-222, 275-278, |
| | | | 327-349, 1.167; | 325-328, 331-334, 375-378, |
| | | | 135-149, 1.165; | 384-387, 408-411, |
| | | | 545-552, 1.164; | 504-507, 543-546, 609-612, |
| | | | 260-277, 1.158; | 695-698; |
| | | | 303-317, 1.157; | Leucine_Zipper 57-78, |
| | | | 279-293, 1.148; | 64-85; Myristyl 116-121, |
| | | | 558-570, 1.147; | 177-182, 186-191, |
| | | | 585-601, 1.145; | 190-195, 258-263, 282-287, |
| | | | 476-500, 1.137; | 354-359, 381-386, |
| | | | 234-242, 1.133; | 589-594, 665-670; |
| | | | 574-581, 1.129; | Pkc_Phospho_Site 197-199, |
| | | | 615-623, 1.128; | 361-363, 478-480, |
| | | | 418-427, 1.128; | 593-595, 614-616, 686-688; |
| | | | 353-362, 1.127; | |
| | | | 461-473, 1.121; | |
| | | | 187-195, 1.113; | |
| | | | 201-216, 1.106; | |
| | | | 378-390, 1.099; | |
| | | | 91-98, 1.098; | |
| | | | 155-168, 1.096; | |
| | | | 513-522, 1.084; | |
| | | | 59-66, 1.063; | |
| | | | 394-400, 1.06 | |
| DEX0378_20.aa.9 | Y | 1 - | 793-817, 1.232; | Asn_Glycosylation 79-82, |
| | | o793- | 744-756, 1.225; | 155-158, 251-254, |
| | | 815i | 14-34, 1.222; | 297-300, 323-326, 689-692; |
| | | | 104-125, 1.211; | Camp_Phospho_Site |
| | | | 686-715, 1.201; | 824-827; |
| | | | 36-57, 1.191; | Ck2_Phospho_Site 86-89, |
| | | | 433-455, 1.185; | 219-222, 275-278, |
| | | | 832-847, 1.172; | 325-328, 331-334, 375-378, |
| | | | 327-349, 1.167; | 384-387, 408-411, |
| | | | 135-149, 1.165; | 504-507, 543-546, 609-612, |
| | | | 545-552, 1.164; | 693-696, 710-713, |
| | | | 775-786, 1.159; | 739-742, 833-836, 853-856; |
| | | | 260-277, 1.158; | Leucine_Zipper |
| | | | 303-317, 1.157; | 57-78, 64-85; Myristyl |
| | | | 279-293, 1.148; | 116-121, 177-182, 186-191, |
| | | | 558-570, 1.147; | 190-195, 258-263, |
| | | | 585-601, 1.145; | 282-287, 354-359, 381-386, |
| | | | 876-890, 1.145; | 589-594, 673-678, |
| | | | 476-500, 1.137; | 684-689, 775-780, 795-800, |
| | | | 664-675, 1.137; | 866-871, 895-900, |
| | | | 234-242, 1.133; | 905-910, 909-914, 913-918; |
| | | | 574-581, 1.129; | Pkc_Phospho_Site |
| | | | 615-623, 1.128; | 197-199, 361-363, 478-480, |
| | | | 418-427, 1.128; | 593-595, 614-616, |
| | | | 353-362, 1.127; | 741-743, 776-778, 823-825, |
| | | | 655-662, 1.125; | 855-857, 883-885; |
| | | | 461-473, 1.121; | Tyr_Phospho_Site 668-675; |
| | | | 187-195, 1.113; | |
| | | | 201-216, 1.106; | |
| | | | 894-905, 1.103; | |
| | | | 378-390, 1.099; | |
| | | | 91-98, 1.098; | |
| | | | 155-168, 1.096; | |
| | | | 513-522, 1.084; | |
| | | | 59-66, 1.063; | |
| | | | 394-400, 1.06; | |
| | | | 732-742, 1.049 | |
| DEX0378_20.aa.10 | Y | 0 - o | 14-34, 1.222; | Asn_Glycosylation 79-82, |
| | | | 104-125, 1.211; | 155-158, 251-254, |
| | | | 36-57, 1.191; | 297-300, 323-326; |
| | | | 433-455, 1.185; | Ck2_Phospho_Site 86-89, |
| | | | 327-349, 1.167; | 219-222, 275-278, |
| | | | 135-149, 1.165; | 325-328, 331-334, 375-378, |
| | | | 545-552, 1.164; | 384-387, 408-411, |
| | | | 260-277, 1.158; | 504-507, 543-546, 609-612; |
| | | | 303-317, 1.157; | Leucine_Zipper |
| | | | 279-293, 1.148; | 57-78, 64-85; Myristyl |
| | | | 558-570, 1.147; | 116-121, 177-182, 186-191, |
| | | | 585-601, 1.145; | 190-195, 258-263, |
| | | | 476-500, 1.137; | 282-287, 354-359, 381-386, |
| | | | 234-242, 1.133; | 589-594; |
| | | | 574-581, 1.129; | Pkc_Phospho_Site 197-199, |
| | | | 615-623, 1.128; | 361-363, 478-480, |
| | | | 418-427, 1.128; | 593-595, 614-616; |
| | | | 353-362, 1.127; | Tyr_Phospho_Site 668-675; |
| | | | 655-662, 1.125; | |
| | | | 461-473, 1.121; | |
| | | | 187-195, 1.113; | |
| | | | 201-216, 1.106; | |
| | | | 378-390, 1.099; | |
| | | | 91-98, 1.098; | |
| | | | 155-168, 1.096; | |
| | | | 513-522, 1.084; | |
| | | | 59-66, 1.063; | |
| | | | 394-400, 1.06 | |
| DEX0378_20.aa.11 | Y | 0 - o | 14-34, 1.222; | Asn_Glycosylation 79-82, |
| | | | 104-125, 1.211; | 155-158, 251-254, |
| | | | 36-57, 1.191; | 297-300, 323-326; |
| | | | 327-349, 1.167; | Ck2_Phospho_Site 86-89, |
| | | | 135-149, 1.165; | 219-222, 275-278, |
| | | | 260-277, 1.158; | 325-328, 331-334, 375-378, |
| | | | 303-317, 1.157; | 384-387, 408-411; |
| | | | 279-293, 1.148; | Leucine_Zipper 57-78, |
| | | | 234-242, 1.133; | 64-85; Myristyl 116-121, |
| | | | 353-362, 1.127; | 177-182, 186-191, |
| | | | 187-195, 1.113; | 190-195, 258-263, 282-287, |
| | | | 201-216, 1.106; | 354-359, 381-386; |
| | | | 378-390, 1.099; | Pkc_Phospho_Site 197-199, |
| | | | 91-98, 1.098; | 361-363; |
| | | | 155-168, 1.096; | |
| | | | 59-66, 1.063; | |
| | | | 394-400, 1.06 | |
| DEX0378_20.aa.13 | N | 0 - o | 298-320, 1.25; | Atp_Gtp_A 384-391; |
| | | | 208-228, 1.222; | Amidation 98-101; |
| | | | 230-251, 1.191; | Asn_Glycosylation |
| | | | 46-53, 1.132; | 273-276; |
| | | | 122-133, 1.123; | Camp_Phospho_Site |
| | | | 68-84, 1.113; | 450-453, 460-463; |
| | | | 156-162, 1.107; | Ck2_Phospho_Site 58-61, |
| | | | 285-292, 1.098; | 107-110, 280-283, |
| | | | 15-21, 1.086; | 334-337, 341-344, 364-367, |
| | | | 171-178, 1.078; | 400-403, 411-414; |
| | | | 253-260, 1.063; | Glycosaminoglycan |
| | | | 100-106, 1.048 | 138-141; |
| | | | | Leucine_Zipper 251-272, |
| | | | | 258-279; Myristyl |
| | | | | 16-21, 19-24, 51-56, |
| | | | | 72-77, 79-84, 88-93, |
| | | | | 98-103, 141-146, 143-148, |
| | | | | 144-149, 149-154, |
| | | | | 310-315; |
| | | | | Pkc_Phospho_Site 93-95, |
| | | | | 187-189, 193-195, |
| | | | | 341-343, 364-366, 370-372, |
| | | | | 391-393, 400-402, |
| | | | | 419-421, 422-424, 453-455; |
| | | | | Rgd 30-32; |
| DEX0378_20.aa.17 | Y | 1 - | 100-124, 1.246; | Amidation 163-166; |
| | | 0896- | 896-920, 1.232; | Asn_Glycosylation |
| | | 918i | 847-859, 1.225; | 182-185, 258-261, 354-357, |
| | | | 14-34, 1.222; | 400-403, 426-429, |
| | | | 207-228, 1.211; | 792-795; |
| | | | 789-818, 1.201; | Camp_Phospho_Site |
| | | | 1030-1058, 1.192; | 159-162, 927-930; |
| | | | 36-57, 1.191; | Ck2_Phospho_Site 189-192, |
| | | | 1183-1193, 1.189; | 322-325, 378-381, |
| | | | 536-558, 1.185; | 428-431, 434-437, 478-481, |
| | | | 935-950, 1.172; | 487-490, 511-514, |
| | | | 163-177, 1.17; | 607-610, 646-649, 712-715, |
| | | | 430-452, 1.167; | 796-799, 813-816, |
| | | | 238-252, 1.165; | 842-845, 936-939, 956-959; |
| | | | 648-655, 1.164; | Glycosaminoglycan |
| | | | 1155-1172, 1.162; | 98-101, 104-107; |
| | | | 878-889, 1.159; | Leucine_Zipper 57-78; |
| | | | 363-380, 1.158; | Myristyl 100-105, |
| | | | 406-420, 1.157; | 101-106, 107-112, 111-116, |
| | | | 382-396, 1.148; | 115-120, 143-148, |
| | | | 661-673, 1.147; | 219-224, 280-285, 289-294, |
| | | | 688-704, 1.145; | 293-298, 361-366, |
| | | | 579-603, 1.137; | 385-390, 457-462, 484-489, |
| | | | 767-778, 1.137; | 692-697, 776-781, |
| | | | 990-1005, 1.137; | 787-792, 878-883, 898-903, |
| | | | 337-345, 1.133; | 969-974; |
| | | | 677-684, 1.129; | Pkc_Phospho_Site 104-106, |
| | | | 69-87, 1.129; | 125-127, 300-302, |
| | | | 718-726, 1.128; | 464-466, 581-583, 696-698, |
| | | | 521-530, 1.128; | 717-719, 844-846, |
| | | | 456-465, 1.127; | 879-881, 926-928, 958-960; |
| | | | 758-765, 1.125; | Tyr_Phospho_Site |
| | | | 564-576, 1.121; | 771-778; |
| | | | 1077-1086, 1.117; | |
| | | | 290-298, 1.113; | |
| | | | 1088-1101, 1.113; | |
| | | | 1126-1134, 1.11; | |
| | | | 304-319, 1.106; | |
| | | | 481-493, 1.099; | |
| | | | 194 -201, 1.098; | |
| | | | 974-986, 1.096; | |
| | | | 258-271, 1.096; | |
| | | | 1139-1147, 1.095; | |
| | | | 136-142, 1.089; | |
| | | | 616-625, 1.084; | |
| | | | 145-151, 1.074; | |
| | | | 59-66, 1.063; | |
| | | | 497-503, 1.06; | |
| | | | 1107-1113, 1.057; | |
| | | | 835-845, 1.049 | |
| DEX0378_20.aa.18 | Y | 1 - | 745-769, 1.232; | Asn_Glycosylation 79-82, |
| | | o745- | 696-708, 1.225; | 130-133, 203-206, |
| | | 767i | 14-34, 1.222; | 249-252, 275-278, 641-644; |
| | | | 638-667, 1.201; | Camp_Phospho_Site |
| | | | 879-907, 1.192; | 776-779; |
| | | | 36-57, 1.191; | Ck2_Phospho_Site 86-89, |
| | | | 1032-1042, 1.189; | 227-230, 277-280, |
| | | | 385-407, 1.185; | 283-286, 327-330, 336-339, |
| | | | 784-799, 1.172; | 360-363, 456-459, |
| | | | 279-301, 1.167; | 495-498, 561-564, 645-648, |
| | | | 110-124, 1.165; | 662-665, 691-694, |
| | | | 497-504, 1.164; | 785-788, 805-808, 893-896, |
| | | | 1004-1021, 1.162; | 927-930, 944-947, |
| | | | 727-738, 1.159; | 955-958; |
| | | | 212-229, 1.158; | Leucine_Zipper 57-78, |
| | | | 255-269, 1.157; | 64-85; Myristyl 152-157, |
| | | | 231-245, 1.148; | 161-166, 165-170, |
| | | | 510-522, 1.147; | 210-215, 234-239, 306-311, |
| | | | 537-553, 1.145; | 333-338, 541-546, |
| | | | 428-452, 1.137; | 625-630, 636-641, 727-732, |
| | | | 616-627, 1.137; | 747-752, 818-823; |
| | | | 839-854, 1.137; | Pkc_Phospho_Site 172-174, |
| | | | 186-194, 1.133; | 313-315, 430-432 |
| | | | 526-533, 1.129; | 545-547, 566-568, 693-695, |
| | | | 567-575, 1.128; | 728-730, 775-777, |
| | | | 370-379, 1.128; | 807-809; |
| | | | 305-314, 1.127; | Tyr_Phospho_Site 620-627; |
| | | | 607-614, 1.125; | |
| | | | 413-425, 1.121; | |
| | | | 926-935, 1.117; | |
| | | | 162-170, 1.113; | |
| | | | 937-950, 1.113; | |
| | | | 975-983, 1.11; | |
| | | | 330-342, 1.099; | |
| | | | 823-835, 1.096; | |
| | | | 130-143, 1.096; | |
| | | | 988-996, 1.095; | |
| | | | 91-100, 1.084; | |
| | | | 465-474, 1.084; | |
| | | | 59-66, 1.063; | |
| | | | 346-352, 1.06; | |
| | | | 956-962, 1.057; | |
| | | | 684-694, 1.049 | |
| DEX0378_20.aa.19 | Y | 1 - | 793-817, 1.232; | Asn_Glycosylation 79-82, |
| | | o793- | 744-756, 1.225; | 155-158, 251-254, |
| | | 815i | 14-34, 1.222; | 297-300, 323-326, 689-692, |
| | | | 104-125, 1.211; | 851-854; |
| | | | 686-715, 1.201; | Camp_Phospho_Site |
| | | | 36-57, 1.191; | 824-827; |
| | | | 433-455, 1.185; | Ck2_Phospho_Site 86-89, |
| | | | 327-349, 1.167; | 219-222, 275-278, |
| | | | 135-149, 1.165; | 325-328, 331-334, 375-378, |
| | | | 545-552, 1.164; | 384-387, 408-411, |
| | | | 775-786, 1.159; | 504-507, 543-546, 609-612, |
| | | | 260-277, 1.158; | 693-696, 710-713, |
| | | | 303-317, 1.157; | 739-742, 833-836, 842-845; |
| | | | 853-869, 1.156; | Leucine_Zipper |
| | | | 279-293, 1.148; | 57-78, 64-85; Myristyl |
| | | | 558-570, 1.147; | 116-121, 177-182, 186-191, |
| | | | 585-601, 1.145; | 190-195, 258-263, |
| | | | 476-500, 1.137; | 282-287, 354-359, 381-386, |
| | | | 664-675, 1.137; | 589-594, 673-678, |
| | | | 234-242, 1.133; | 684-689, 775-780, 795-800, |
| | | | 574-581, 1.129; | 848-853, 852-857; |
| | | | 615-623, 1.128; | Pkc_Phospho_Site 197-199 |
| | | | 418-427, 1.128; | 361-363, 478-480, |
| | | | 353-362, 1.127; | 593-595, 614-616, 741-743, |
| | | | 655-662, 1.125; | 776-778, 823-825, |
| | | | 461-473, 1.121; | 835-837; |
| | | | 187-195, 1.113; | Tyr_Phospho_Site 668-675; |
| | | | 201-216, 1.106; | |
| | | | 378-390, 1.099; | |
| | | | 91-98, 1.098; | |
| | | | 155-168, 1.096; | |
| | | | 513-522, 1.084; | |
| | | | 59-66, 1.063; | |
| | | | 394-400, 1.06; | |
| | | | 732-742, 1.049 | |
| DEX0378_20.aa.20 | Y | 0 - o | 686-706, 1.4; | Asn_Glycosylation 79-82, |
| | | | 710-734, 1.295; | 155-158, 251-254, |
| | | | 14-34, 1.222; | 297-300, 323-326, 689-692; |
| | | | 104-125, 1.211; | Ck2_Phospho_Site |
| | | | 36-57, 1.191; | 86-89, 219-222, 275-278, |
| | | | 433-455, 1.185; | 325-328, 331-334, |
| | | | 327-349, 1.167; | 375-378, 384-387, 408-411, |
| | | | 135-149, 1.165; | 504-507, 543-546, |
| | | | 545-552, 1.164; | 609-612, 732-735; |
| | | | 260-277, 1.158; | Leucine_Zipper 57-78, |
| | | | 303-317, 1.157; | 64-85; Myristyl 116-121, |
| | | | 279-293, 1.148; | 177-182, 186-191, |
| | | | 558-570, 1.147; | 190-195, 258-263, 282-287, |
| | | | 585-601, 1.145; | 354-359, 381-386, |
| | | | 476-500, 1.137; | 589-594, 673-678, 684-689, |
| | | | 664-675, 1.137; | 696-701; |
| | | | 234-242, 1.133; | Pkc_Phospho_Site 197-199, |
| | | | 574-581, 1.129; | 361-363, 478-480, |
| | | | 615-623, 1.128; | 593-595, 614-616, 715-717; |
| | | | 418-427, 1.128; | Tyr_Phospho_Site |
| | | | 353-362, 1.127; | 668-675; |
| | | | 655-662, 1.125; | |
| | | | 461-473, 1.121; | |
| | | | 187-195, 1.113; | |
| | | | 201-216, 1.106; | |
| | | | 378-390, 1.099; | |
| | | | 91-98, 1.098; | |
| | | | 155-168, 1.096; | |
| | | | 513-522, 1.084; | |
| | | | 59-66, 1.063; | |
| | | | 394-400, 1.06 | |
| DEX0378_20.aa.22 | N | 0 - o | 208-228, 1.222; | Amidation 98-101; |
| | | | 298-319, 1.211; | Asn_Glycosylation |
| | | | 230-251, 1.191; | 273-276, 349-352, 445-448; |
| | | | 329-343, 1.165; | Ck2_Phospho_Site |
| | | | 454-471, 1.158; | 58-61, 107-110, 280-283, |
| | | | 428-436, 1.133; | 413-416, 469-472; |
| | | | 46-53, 1.132; | Glycosaminoglycan |
| | | | 122-133, 1.123; | 138-141; |
| | | | 473-483, 1.12; | Leucine_Zipper 251-272, |
| | | | 381-389, 1.113; | 258-279; Myristyl |
| | | | 68-84, 1.113; | 16-21, 19-24, 51-56, |
| | | | 156-162, 1.107; | 72-77, 79-84, 88-93, |
| | | | 395-410, 1.106; | 98-103, 141-146, 143-148, |
| | | | 285-292, 1.098; | 144-149, 149-154, |
| | | | 349-362, 1.096; | 310-315, 371-376, 380-385, |
| | | | 15-21, 1.086; | 384-389, 452-457, |
| | | | 171-178, 1.078; | 476-481; |
| | | | 253-260, 1.063; | Pkc_Phospho_Site 93-95, |
| | | | 100-106, 1.048 | 187-189, 193-195, |
| | | | | 391-393; Rgd 30-32; |
| DEX0378_20.aa.23 | Y | 0 - o | 14-34, 1.222; | Asn_Glycosylation 79-82, |
| | | | 104-125, 1.211; | 155-158, 251-254, |
| | | | 36-57, 1.191; | 297-300, 323-326; |
| | | | 672-684, 1.191; | Ck2_Phospho_Site 86-89, |
| | | | 433-455, 1.185; | 219-222, 275-278, |
| | | | 327-349, 1.167; | 325-328, 331-334, 375-378, |
| | | | 135-149, 1.165; | 384-387, 408-411, |
| | | | 545-552, 1.164; | 504-507, 543-546, 609-612; |
| | | | 260-277, 1.158; | Leucine_Zipper |
| | | | 303-317, 1.157; | 57-78, 64-85; Myristyl |
| | | | 279-293, 1.148; | 116-121, 177-182, 186-191, |
| | | | 558-570, 1.147; | 190-195, 258-263, |
| | | | 585-601, 1.145; | 282-287, 354-359, 381-386, |
| | | | 476-500, 1.137; | 589-594; |
| | | | 234-242, 1.133; | Pkc_Phospho_Site 197-199, |
| | | | 574-581, 1.129; | 361-363, 478-480, |
| | | | 615-623, 1.128; | 593-595, 614-616, 674-676; |
| | | | 418-427, 1.128; | |
| | | | 353-362, 1.127; | |
| | | | 461-473, 1.121; | |
| | | | 187-195, 1.113; | |
| | | | 201-216, 1.106; | |
| | | | 378-390, 1.099; | |
| | | | 91-98, 1.098; | |
| | | | 155-168, 1.096; | |
| | | | 513-522, 1.084; | |
| | | | 59-66, 1.063; | |
| | | | 394-400, 1.06 | |
| DEX0378_20.aa.27 | Y | 1 - | 793-817, 1.232; | Asn_Glycosylation 79-82, |
| | | o793- | 744-756, 1.225; | 155-158, 251-254, |
| | | 815i | 14-34, 1.222; | 297-300, 323-326, 689-692; |
| | | | 104-125, 1.211; | Camp_Phospho_Site |
| | | | 686-715, 1.201; | 824-827; |
| | | | 36-57, 1.191; | Ck2_Phospho_Site 86-89, |
| | | | 920-942, 1.19; | 219-222, 275-278, |
| | | | 433-455, 1.185; | 325-328, 331-334, 375-378, |
| | | | 832-847, 1.172; | 384-387, 408-411, |
| | | | 327-349, 1.167; | 504-507, 543-546, 609-612, |
| | | | 135-149, 1.165; | 693-696, 710-713, |
| | | | 545-552, 1.164; | 739-742, 833-836, 853-856, |
| | | | 775-786, 1.159; | 931-934; |
| | | | 260-277, 1.158; | Leucine_Zipper 57-78, |
| | | | 303-317, 1.157; | 64-85; Myristyl 116-121, |
| | | | 279-293, 1.148; | 177-182, 186-191, |
| | | | 558-570, 1.147; | 190-195, 258-263, 282-287, |
| | | | 585-601, 1.145; | 354-359, 381-386, |
| | | | 876-890, 1.145; | 589-594, 673-678, 684-689, |
| | | | 476-500, 1.137; | 775-780, 795-800, |
| | | | 664-675, 1.137; | 866-871, 895-900, 905-910, |
| | | | 234-242, 1.133; | 909-914, 921-926; |
| | | | 574-581, 1.129; | Pkc_Phospho_Site 197-199, |
| | | | 615-623, 1.128; | 361-363, 478-480, |
| | | | 418-427, 1.128; | 593-595, 614-616, 741-743, |
| | | | 353-362, 1.127; | 776-778, 823-825, |
| | | | 655-662, 1.125; | 855-857, 883-885; |
| | | | 461-473, 1.121; | Tyr_Phospho_Site 668-675; |
| | | | 187-195, 1.113; | |
| | | | 201-216, 1.106; | |
| | | | 894-905, 1.103; | |
| | | | 378-390, 1.099; | |
| | | | 91-98, 1.098; | |
| | | | 155-168, 1.096; | |
| | | | 513-522, 1.084; | |
| | | | 59-66, 1.063; | |
| | | | 394-400, 1.06; | |
| | | | 732-742, 1.049 | |
| DEX0378_20.aa.29 | Y | 0 - o | 14-34, 1.222; | Asn_Glycosylation 79-82, |
| | | | 104-125, 1.211; | 155-158, 251-254, |
| | | | 686-715, 1.201; | 297-300, 323-326, 689-692; |
| | | | 36-57, 1.191; | Ck2_Phospho_Site |
| | | | 433-455, 1.185; | 86-89, 219-222, 275-278, |
| | | | 327-349, 1.167; | 325-328, 331-334, |
| | | | 135-149, 1.165; | 375-378, 384-387, 408-411, |
| | | | 545-552, 1.164; | 504-507, 543-546, |
| | | | 260-277, 1.158; | 609-612, 693-696, 710-713; |
| | | | 303-317, 1.157; | Leucine_Zipper |
| | | | 279-293, 1.148; | 57-78, 64-85; Myristyl |
| | | | 558-570, 1.147; | 116-121, 177-182, 186-191, |
| | | | 585-601, 1.145; | 190-195, 258-263, |
| | | | 476-500, 1.137; | 282-287, 354-359, 381-386, |
| | | | 664-675, 1.137; | 589-594, 673-678, |
| | | | 234-242, 1.133; | 684-689; |
| | | | 574-581, 1.129; | Pkc_Phospho_Site 197-199, |
| | | | 615-623, 1.128; | 361-363, 478-480, |
| | | | 418-427, 1.128; | 593-595, 614-616; |
| | | | 353-362, 1.127; | Tyr_Phospho_Site 668-675; |
| | | | 655-662, 1.125; | |
| | | | 461-473, 1.121; | |
| | | | 187-195, 1.113; | |
| | | | 201-216, 1.106; | |
| | | | 378-390, 1.099; | |
| | | | 91-98, 1.098; | |
| | | | 155-168, 1.096; | |
| | | | 513-522, 1.084; | |
| | | | 59-66, 1.063; | |
| | | | 394-400, 1.06 | |
| DEX0378_20.aa.30 | Y | 0 - o | 14-34, 1.222; | Asn_Glycosylation 79-82, |
| | | | 104-125, 1.211; | 155-158, 251-254, |
| | | | 36-57, 1.191; | 297-300, 323-326; |
| | | | 433-455, 1.185; | Ck2_Phospho_Site 86-89, |
| | | | 327-349, 1.167; | 219-222, 275-278, |
| | | | 135-149, 1.165; | 325-328, 331-334, 375-378, |
| | | | 545-552, 1.164; | 384-387, 408-411, |
| | | | 260-277, 1.158; | 504-507, 543-546; |
| | | | 303-317, 1.157; | Leucine_Zipper 57-78, |
| | | | 279-293, 1.148; | 64-85; Myristyl 116-121, |
| | | | 558-570, 1.147; | 177-182, 186-191, |
| | | | 476-500, 1.137; | 190-195, 258-263, 282-287, |
| | | | 234-242, 1.133; | 354-359, 381-386, |
| | | | 574-581, 1.129; | 589-594; |
| | | | 418-427, 1.128; | Pkc_Phospho_Site 197-199, |
| | | | 353-362, 1.127; | 361-363, 478-480, |
| | | | 461-473, 1.121; | 593-595; |
| | | | 187-195, 1.113; | |
| | | | 201-216, 1.106; | |
| | | | 378-390, 1.099; | |
| | | | 91-98, 1.098; | |
| | | | 155-168, 1.096; | |
| | | | 513-522, 1.084; | |
| | | | 585-594, 1.073; | |
| | | | 59-66, 1.063; | |
| | | | 394-400, 1.06 | |
| DEX0378_20.aa.31 | N | 0 - o | 208-228, 1.222; | Amidation 98-101; |
| | | | 298-319, 1.211; | Asn_Glycosylation |
| | | | 230-251, 1.191; | 273-276, 349-352, 445-448, |
| | | | 329-343, 1.165; | 491-494; |
| | | | 454-471, 1.158; | Ck2_Phospho_Site 58-61, |
| | | | 473-487, 1.148; | 107-110, 280-283, |
| | | | 428-436, 1.133; | 413-416, 469-472; |
| | | | 46-53, 1.132; | Glycosaminoglycan |
| | | | 122-133, 1.123; | 138-141; |
| | | | 497-503, 1.116; | Leucine_Zipper 251-272, |
| | | | 381-389, 1.113; | 258-279; Myristyl |
| | | | 68-84, 1.113; | 16-21, 19-24, 51-56, |
| | | | 156-162, 1.107; | 72-77, 79-84, 88-93, |
| | | | 395-410, 1.106; | 98-103, 141-146, 143-148, |
| | | | 285-292, 1.098; | 144-149, 149-154, |
| | | | 349-362, 1.096; | 310-315, 371-376, 380-385, |
| | | | 15-21, 1.086; | 384-389, 452-457, |
| | | | 171-178, 1.078; | 476-481; |
| | | | 253-260, 1.063; | Pkc_Phospho_Site 93-95, |
| | | | 100-106, 1.048 | 187-189, 193-195, |
| | | | | 391-393; Rgd 30-32; |
| DEX0378_20.aa.33 | N | 0 - o | 193-204, 1.182; | Amidation 89-92, 110-113, |
| | | | 38-47, 1.119; | 140-143; |
| | | | 143-149, 1.061; | Camp_Phospho_Site |
| | | | 111-118, 1.06; | 178-181, 179-182; |
| | | | 54-62, 1.059; 89-101, | Ck2_Phospho_Site 98-101, |
| | | | 1.048; 158-164, | 156-159; |
| | | | 1.048 | Glycosaminoglycan |
| | | | | 193-196; Myristyl 34-39, |
| | | | | 78-83, 79-84, 89-94, |
| | | | | 130-135, 133-138; |
| | | | | Pkc_Phospho_Site 35-37, |
| | | | | 68-70, 69-71, 84-86, |
| | | | | 160-162, 176-178, |
| | | | | 193-195; Rgd 26-28; |
| DEX0378_29.aa.12 | N | 0 - o | 30-53, 1.273; 4-12, | Amidation 24-27; |
| | | | 1.15; 55-64, | Camp_Phospho_Site 5-8; |
| | | | 1.065 | Ck2_Phospho_Site |
| | | | | 28-31; Myristyl 17-22, |
| | | | | 18-23, 19-24, 21-26, |
| | | | | 41-46; |
| | | | | Pkc_Phospho_Site 24-26, |
| | | | | 69-71; |
| DEX0378_29.aa.19 | N | 0 - o | 69-120, 1.225; | Amidation 60-63; |
| | | | 56-65, 1.154; 4-12, | Camp_Phospho_Site 5-8; |
| | | | 1.15; 17-34, | Ck2_Phospho_Site |
| | | | 1.148; 37-53, | 24-27, 121-124; |
| | | | 1.105; 123-129, | Myristyl 17-22, 18-23, |
| | | | 1.099 | 19-24, 38-43; |
| | | | | Pkc_Phospho_Site 32-34, |
| | | | | 60-62, 71-73, 123-125; |
| DEX0378_34.aa.4 | N | 0 - o | 25-42, 1.16; 47-72, | Camp_Phospho_Site 79-82; |
| | | | 1.141; 97-104, | Pkc_Phospho_Site |
| | | | 1.139; 78-94, | 77-79, 78-80; |
| | | | 1.104; 17-23, | |
| | | | 1.077 | |
| DEX0378_37.aa.3 | N | 0 - o | 38-56, 1.137; 61-69, | Myristyl 90-95, 106-111, |
| | | | 1.131; 119-132, | 107-112; |
| | | | 1.109; 105-112, | Pkc_Phospho_Site 61-63, |
| | | | 1.074; 88-94, | 70-72; |
| | | | 1.07 | |
| DEX0378_42.aa.7 | Y | 2 - i2- | 98-113, 1.258; | Asn_Glycosylation 73-76; |
| | | 24o39- | 36-67, 1.251; 4-25, | Ck2_Phospho_Site |
| | | 61i | 1.191; 268-274, | 45-48, 75-78, 76-79, |
| | | | 1.174; 187-202, | 116-119, 146-149, 179-182, |
| | | | 1.137; 251-262, | 216-219, 234-237, |
| | | | 1.134; 148-172, | 267-270; |
| | | | 1.133; 236-249, | Leucine_Zipper 164-185; |
| | | | 1.09; 175-183, | Myristyl 82-87, |
| | | | 1.077; 209-216, | 99-104, 142-147, 192-197, |
| | | | 1.065; 225-231, | 248-253; |
| | | | 1.044 | Pkc_Phospho_Site 85-87, |
| | | | | 159-161, 272-274; |
| DEX0378_42.aa.8 | N | 0 - o | 134-140, 1.174; | Ck2_Phospho_Site 12-15, |
| | | | 53-68, 1.137; | 45-48, 82-85, 100-103, |
| | | | 117-128, 1.134; | 133-136; |
| | | | 14-38, 1.133; | Leucine_Zipper 30-51; |
| | | | 102-115, 1.09; | Myristyl 5-10, 58-63, |
| | | | 41-49, 1.077; 75-82, | 114-119; |
| | | | 1.065; 91-97, | Pkc_Phospho_Site 25-27, |
| | | | 1.044 | 138-140; |
| DEX0378_42.aa.9 | N | 1 -i62- | 61-80, 1.225; 85-92, | Ck2_Phospho_Site 28-31, |
| | | 81o | 1.138; 94-103, | 109-112, 110-113; |
| | | | 1.1; 11-21, | Myristyl 81-86; |
| | | | 1.088 | Pkc_Phospho_Site 109-111; |
| | | | | Tyr_Phospho_Site |
| | | | | 111-117; |
| DEX0378_42.aa.10 | N | 2 - i81- | 177-192, 1.258; | Amidation 75-78; |
| | | 103o118- | 115-146, 1.251; | Asn_Glycosylation 12-15, |
| | | 140i | 78-104, 1.191; | 152-155; |
| | | | 20-72, 1.181; | Ck2_Phospho_Site 55-58, |
| | | | 347-353, 1.174; | 124-127, 154-157, |
| | | | 266-281, 1.137; | 155-158, 195-198, 225-228, |
| | | | 330-341, 1.134; | 258-261, 295-298, |
| | | | 227-251, 1.133; | 313-316, 346-349; |
| | | | 315-328, 1.09; | Leucine_Zipper 243-264; |
| | | | 254-262, 1.077; | Myristyl 13-18, |
| | | | 288-295, 1.065; | 72-77, 161-166, 178-183, |
| | | | 304-310, 1.044 | 221-226, 271-276, |
| | | | | 327-332; |
| | | | | Pkc_Phospho_Site 34-36, |
| | | | | 42-44, 164-166, |
| | | | | 238-240, 351-353; |
| DEX0378_43.aa.2 | N | 0 - o | 68-90, 1.153; 51-65, | Ck2_Phospho_Site 38-41; |
| | | | 1.148; 101-108, | Myristyl 18-23, |
| | | | 1.113; 8-14, | 33-38, 34-39, 48-53, |
| | | | 1.057 | 70-75, 74-79; |
| | | | | Pkc_Phospho_Site 23-25; |
| | | | | Rgd 98-100; |
| | | | | Prokar_Lipoprotein |
| | | | | 69-79; |
| DEX0378_43.aa.4 | Y | 14 - | 415-472, 1.28; | Atpase_E1_E2 773-779; |
| | | i25- | 1363-1386, 1.278; | Asn_Glycosylation 80-83, |
| | | 47o57- | 1150-1187, 1.252; | 133-136, 138-141, |
| | | 79i100- | 1439-1470, 1.233; | 960-963; |
| | | 122o159- | 243-269, 1.227; | Camp_Phospho_Site |
| | | 178i185- | 77-128, 1.209; | 646-649, 748-751, 923-926; |
| | | 207o445- | 15-48, 1.205; | Ck2_Phospho_Site |
| | | 467i652- | 692-732, 1.203; | 52-55, 291-294, 534-537, |
| | | 674o700- | 1242-1256, 1.192; | 648-651, 751-754, |
| | | 722i1247- | 841-853, 1.189; | 759-762, 794-797, 833-836, |
| | | 1266o1281- | 607-613, 1.185; | 874-877, 900-903, |
| | | 1300i1331- | 650-670, 1.183; | 954-957, 961-964; |
| | | 1353o1368- | 1213-1239, 1.182; | Myristyl 58-63, 78-83, |
| | | 1387i1394- | 618-626, 1.179; | 79-84, 136-141, |
| | | 1416o1441- | 186-204, 1.179; | 189-194, 207-212, 211-216, |
| | | 1463i | 338-354, 1.176; | 257-262, 376-381, |
| | | | 161-178, 1.175; | 669-674, 878-883, 905-910; |
| | | | 505-513, 1.175; | Pkc_Phospho_Site |
| | | | 57-75, 1.172; | 417-419, 640-642, 772-774, |
| | | | 1400-1414, 1.17; | 895-897; |
| | | | 325-333, 1.167; | Tyr_Phospho_Site 398-404, |
| | | | 1258-1299, 1.166; | 402-410, 863-870, |
| | | | 903-911, 1.163; | 982-988; Mip 85-93; |
| | | | 520-531, 1.161; | |
| | | | 533-541, 1.145; | |
| | | | 1110-1143, 1.144; | |
| | | | 970-977, 1.14; | |
| | | | 1330-1354, 1.14; | |
| | | | 1472-1484, 1.139; | |
| | | | 790-800, 1.136; | |
| | | | 1029-1051, 1.134; | |
| | | | 553-561, 1.133; | |
| | | | 1073-1086, 1.128; | |
| | | | 819-836, 1.126; | |
| | | | 143-158, 1.124; | |
| | | | 681-689, 1.122; | |
| | | | 1526-1533, 1.121; | |
| | | | 491-498, 1.12; | |
| | | | 294-313, 1.117; | |
| | | | 572-579, 1.111; | |
| | | | 1057-1067, 1.11; | |
| | | | 275-286, 1.108; | |
| | | | 931-952, 1.107; | |
| | | | 220-237, 1.105; | |
| | | | 759-767, 1.098; | |
| | | | 1301-1307, 1.095; | |
| | | | 363-383, 1.094; | |
| | | | 919-925, 1.092; | |
| | | | 873-879, 1.087; | |
| | | | 1200-1208, 1.086; | |
| | | | 404-412, 1.085; | |
| | | | 1312-1318, 1.069; | |
| | | | 1005-1011, 1.068; | |
| | | | 882-888, 1.059; | |
| | | | 809-817, 1.051 | |
| DEX0378_43.aa.5 | N | 6 - | 115-148, 1.285; | Atpase_E1_E2 268-274; |
| | | o742- | 858-881, 1.278; | Asn_Glycosylation |
| | | 764i776- | 645-682, 1.252; | 455-458; |
| | | 795o826- | 934-965, 1.233; | Camp_Phospho_Site |
| | | 848i861- | 197-227, 1.228; | 243-246, 418-421; |
| | | 883o893- | 154-189, 1.216; | Ck2_Phospho_Site 145-148, |
| | | 915i936- | 737-751, 1.192; | 246-249, 254-257, |
| | | 958o | 336-348, 1.189; | 289-292, 328-331, 369-372, |
| | | | 708-734, 1.182; | 395-398, 449-452, |
| | | | 57-112, 1.176; | 456-459, 500-503, 507-510, |
| | | | 895-909, 1.17; | 522-525, 581-584, |
| | | | 753-794, 1.166; | 608-611, 620-623, 708-711, |
| | | | 398-406, 1.163; | 775-778, 856-859; |
| | | | 15-39, 1.156; | Myristyl 101-106, |
| | | | 605-638, 1.144; | 154-159, 373-378, 400-405, |
| | | | 465-472, 1.14; | 531-536, 604-609, |
| | | | 825-849, 1.14; | 704-709, 837-842, 860-865, |
| | | | 967-979, 1.139; | 886-891, 931-936, |
| | | | 285-295, 1.136; | 999-1004; |
| | | | 524-546, 1.134; | Pkc_Phospho_Site 120-122, |
| | | | 568-581, 1.128; | 149-151, 155-157, |
| | | | 314-331, 1.126; | 267-269, 390-392, 563-565, |
| | | | 1021-1028, 1.121; | 599-601, 615-617, |
| | | | 552-562, 1.11; | 974-976, 1000-1.002; |
| | | | 426-447, 1.107; | Tyr_Phospho_Site 358-365, |
| | | | 4-13, 1.104; 254-262, | 477-483; |
| | | | 1.098; 796-802, | Prokar_Lipoprotein |
| | | | 1.095; 414-420, | 95-105; |
| | | | 1.092; 368-374, | |
| | | | 1.087; 695-703, | |
| | | | 1.086; 807-813, | |
| | | | 1.069; 500-506, | |
| | | | 1.068; 377-383, | |
| | | | 1.059; 304-312, | |
| | | | 1.051 | |
| DEX0378_43.aa.6 | N | 8 - | 876-899, 1.278; | Atpase_E1_E2 224-230; |
| | | i103- | 663-700, 1.252; | Asn_Glycosylation |
| | | 125o151- | 952-983, 1.233; | 411-414; |
| | | 173i760- | 143-183, 1.203; | Camp_Phospho_Site 97-100, |
| | | 779o794- | 755-769, 1.192; | 199-202, 374-377; |
| | | 813i844- | 292-304, 1.189; | Ck2_Phospho_Site 99-102, |
| | | 866o881- | 58-64, 1.185; | 202-205, 210-213, |
| | | 900i907- | 101-121, 1.183; | 245-248, 284-287, 325-328, |
| | | 929o954- | 726-752, 1.182; | 351-354, 405-408, |
| | | 976i | 69-77, 1.179; | 412-415, 456-459, 463-466, |
| | | | 913-927, 1.17; | 478-481, 537-540, |
| | | | 771-812, 1.166; | 564-567, 576-579, 726-729, |
| | | | 354-362, 1.163; | 793-796, 874-877; |
| | | | 644-656, 1.162; | Myristyl 120-125, |
| | | | 561-618, 1.161; | 329-334, 356-361, 487-492, |
| | | | 421-428, 1.14; | 560-565, 633-638, |
| | | | 843-867, 1.14; | 722-727, 855-860, 878-883, |
| | | | 985-997, 1.139; | 904-909, 949-954; |
| | | | 241-251, 1.136; | Pkc_Phospho_Site 91-93, |
| | | | 480-502, 1.134; | 223-225, 346-348, |
| | | | 4-12, 1.133; 524-537, | 519-521, 555-557, 571-573, |
| | | | 1.128; 270-287, | 630-632, 639-641, |
| | | | 1.126; 132-140, | 992-994; |
| | | | 1.122; 1039-1046, | Tyr_Phospho_Site 314-321, |
| | | | 1.121; 23-30, | 433-439; |
| | | | 1.111; 508-518, | |
| | | | 1.11; 634-642, | |
| | | | 1.109; 382-403, | |
| | | | 1.107; 210-218, | |
| | | | 1.098; 814-820, | |
| | | | 1.095; 370-376, | |
| | | | 1.092; 324-330, | |
| | | | 1.087; 713-721, | |
| | | | 1.086; 825-831, | |
| | | | 1.069; 456-462, | |
| | | | 1.068; 333-339, | |
| | | | 1.059; 260-268, | |
| | | | 1.051 | |
| DEX0378_43.aa.7 | N | 9 - | 954-977, 1.278; | Ribosomal_S2_1 704-715; |
| | | i103- | 601-638, 1.252; | Atpase_E1_E2 |
| | | 125o151- | 1030-1061, 1.233; | 224-230; |
| | | 173i690- | 831-890, 1.232; | Asn_Glycosylation |
| | | 712o762- | 648-662, 1.231; | 411-414; |
| | | 784i872- | 764-824, 1.224; | Camp_Phospho_Site 97-100, |
| | | 891o922- | 143-183, 1.203; | 199-202, 374-377; |
| | | 944i957- | 748-762, 1.192; | Ck2_Phospho_Site 99-102, |
| | | 979o989- | 292-304, 1.189; | 202-205, 210-213, |
| | | 1011i1032- | 58-64, 1.185; | 245-248, 284-287, 325-328, |
| | | 1054o | 101-121, 1.183; | 351-354, 405-408, |
| | | | 719-745, 1.182; | 412-415, 456-459, 463-466, |
| | | | 69-77, 1.179; | 478-481, 537-540, |
| | | | 991-1005, 1.17; | 564-567, 576-579, 719-722; |
| | | | 680-714, 1.167; | 871-874, 952-955; |
| | | | 354-362, 1.163; | Myristyl 120-125, |
| | | | 561-594, 1.144; | 329-334, 356-361, 487-492, |
| | | | 421-428, 1.14; | 560-565, 659-664, |
| | | | 921-945, 1.14; | 666-671, 678-683, 698-703, |
| | | | 1063-1075, 1.139; | 715-720, 933-938, |
| | | | 241-251, 1.136; | 956-961, 982-987; |
| | | | 480-502, 1.134; | Pkc_Phospho_Site 91-93, |
| | | | 4-12, 1.133; 524-537, | 223-225, 346-348, |
| | | | 1.128; 270-287, | 519-521, 555-557, 571-573, |
| | | | 1.126; 132-140, | 689-691, 822-824, |
| | | | 1.122; 1117-1124, | 834-836; |
| | | | 1.121; 23-30, | Tyr_Phospho_Site 314-321, |
| | | | 1.111; 508-518, | 433-439; |
| | | | 1.11; 382-403, | |
| | | | 1.107; 210-218, | |
| | | | 1.098; 892-898, | |
| | | | 1.095; 370-376, | |
| | | | 1.092; 324-330, | |
| | | | 1.087; 903-909, | |
| | | | 1.069; 456-462, | |
| | | | 1.068; 333-339, | |
| | | | 1.059; 260-268, | |
| | | | 1.051 | |
| DEX0378_43.aa.9 | Y | 6 - i25- | 415-472, 1.28; | Asn_Glycosylation 80-83, |
| | | 47o57- | 243-269, 1.227; | 133-136, 138-141; |
| | | 79i100- | 77-128, 1.209; | Ck2_Phospho_Site 52-55, |
| | | 122o159- | 15-48, 1.205; | 291-294; Myristyl |
| | | 178i185- | 186-204, 1.179; | 58-63, 78-83, 79-84, |
| | | 207o445- | 338-354, 1.176; | 136-141, 189-194, 207-212, |
| | | 467i | 161-178, 1.175; | 211-216, 257-262, |
| | | | 505-513, 1.175; | 376-381; |
| | | | 57-75, 1.172; | Pkc_Phospho_Site 417-419; |
| | | | 325-333, 1.167; | Tyr_Phospho_Site |
| | | | 143-158, 1.124; | 398-404, 402-410; Mip |
| | | | 491-498, 1.12; | 85-93; |
| | | | 520-526, 1.118; | |
| | | | 294-313, 1.117; | |
| | | | 275-286, 1.108; | |
| | | | 220-237, 1.105; | |
| | | | 363-383, 1.094; | |
| | | | 404-412, 1.085 | |
| DEX0378_43.aa.11 | Y | 2 - o23- | 63-100, 1.201; 6-41, | Asn_Glycosylation 3-6; |
| | | 45i65- | 41, 1.183; 52-60, | Myristyl 40-45; |
| | | 87o | 1.122; 108-114, | Pkc_Phospho_Site 119-121, |
| | | | 1.073 | 124-126; |
| DEX0378_43.aa.12 | N | 8 - | 899-922, 1.278; | Atpase_E1_E2 224-230; |
| | | i103- | 601-638, 1.252; | Asn_Glycosylation |
| | | 125o151- | 975-1006, 1.233; | 411-414; |
| | | 173i702- | 776-835, 1.232; | Camp_Phospho_Site 97-100, |
| | | 724o817- | 709-769, 1.224; | 199-202, 374-377; |
| | | 836i867- | 143-183, 1.203; | Ck2_Phospho_Site 99-102, |
| | | 889o904- | 693-707, 1.192; | 202-205, 210-213, |
| | | 923i930- | 292-304, 1.189; | 245-248, 284-287, 325-328, |
| | | 952o977- | 58-64, 1.185; | 351-354, 405-408, |
| | | 999i | 101-121, 1.183; | 412-415, 456-459, 463-466, |
| | | | 664-690, 1.182; | 478-481, 537-540, |
| | | | 69-77, 1.179; | 564-567, 576-579, 664-667, |
| | | | 936-950, 1.17; | 816-819, 897-900; |
| | | | 354-362, 1.163; | Myristyl 120-125, |
| | | | 561-594, 1.144; | 329-334, 356-361, 487-492, |
| | | | 421-428, 1.14; | 560-565, 660-665, |
| | | | 866-890, 1.14; | 878-883, 901-906, 927-932, |
| | | | 1008-1020, 1.139; | 972-977; |
| | | | 241-251, 1.136; | Pkc_Phospho_Site 91-93, |
| | | | 480-502, 1.134; | 223-225, 346-348, |
| | | | 4-12, 1.133; 524-537, | 519-521, 555-557, 571-573, |
| | | | 1.128; 270-287, | 767-769, 779-781; |
| | | | 1.126; 132-140, | Tyr_Phospho_Site 314-321, |
| | | | 1.122; 1062-1069, | 433-439; |
| | | | 1.121; 23-30, | |
| | | | 1.111; 508-518, | |
| | | | 1.11; 382-403, | |
| | | | 1.107; 210-218, | |
| | | | 1.098; 837-843, | |
| | | | 1.095; 370-376, | |
| | | | 1.092; 324-330, | |
| | | | 1.087; 651-659, | |
| | | | 1.086; 848-854, | |
| | | | 1.069; 456-462, | |
| | | | 1.068; 333-339, | |
| | | | 1.059; 260-268, | |
| | | | 1.051 | |
| DEX0378_43.aa.13 | N | 3 - | 601-638, 1.252; | Atpase_E1_E2 224-230; |
| | | i103- | 709-769, 1.224; | Asn_Glycosylation |
| | | 125o151- | 143-183, 1.203; | 411-414; |
| | | 173i698- | 693-707, 1.192; | Camp_Phospho_Site 97-100, |
| | | 717o | 292-304, 1.189; | 199-202, 374-377; |
| | | | 58-64, 1.185; | Ck2_Phospho_Site 99-102, |
| | | | 101-121, 1.183; | 202-205, 210-213, |
| | | | 664-690, 1.182; | 245-248, 284-287, 325-328, |
| | | | 69-77, 1.179; | 351-354, 405-408, |
| | | | 354-362, 1.163; | 412-415, 456-459, 463-466, |
| | | | 561-594, 1.144; | 478-481, 537-540, |
| | | | 421-428, 1.14; | 564-567, 576-579, 664-667; |
| | | | 241-251, 1.136; | Myristyl 120-125, |
| | | | 480-502, 1.134; | 329-334, 356-361, |
| | | | 4-12, 1.133; 524-537, | 487-492, 560-565, 660-665; |
| | | | 1.128; 270-287, | Pkc_Phospho_Site |
| | | | 1.126; 132-140, | 91-93, 223-225, 346-348, |
| | | | 1.122; 23-30, | 519-521, 555-557, |
| | | | 1.111; 508-518, | 571-573, 767-769, 779-781; |
| | | | 1.11; 382-403, | Tyr_Phospho_Site |
| | | | 1.107; 210-218, | 314-321, 433-439; |
| | | | 1.098; 370-376, | |
| | | | 1.092; 324-330, | |
| | | | 1.087; 651-659, | |
| | | | 1.086; 456-462, | |
| | | | 1.068; 333-339, | |
| | | | 1.059; 260-268, | |
| | | | 1.051 | |
| DEX0378_55.aa.3 | N | 0 - o | 128-167, 1.15; | Asn_Glycosylation |
| | | | 308-341, 1.142; | 311-314; |
| | | | 63-78, 1.141; 50-56, | Ck2_Phospho_Site 33-36, |
| | | | 1.14; 107-121, | 35-38, 82-85, 211-214; |
| | | | 1.137; 15-22, | Myristyl 128-133, |
| | | | 1.135; 214-221, | 147-152, 171-176; |
| | | | 1.134; 33-48, | Pkc_Phospho_Site 61-63, |
| | | | 1.126; 231-268, | 175-177, 181-183, |
| | | | 1.118; 281-300, | 277-279; |
| | | | 1.112; 178-184, | Tyr_Phospho_Site 65-73, |
| | | | 1.102; 197-203, | 230-238; |
| | | | 1.096; 356-364, | |
| | | | 1.091; 345-353, | |
| | | | 1.073; 94-100, | |
| | | | 1.05; 170-176, | |
| | | | 1.047 | |
| DEX0378_55.aa.4 | N | 0 - o | 128-167, 1.15; | Asn_Glycosylation |
| | | | 308-345, 1.142; | 311-314; |
| | | | 63-78, 1.141; 50-56, | Ck2_Phospho_Site 33-36, |
| | | | 1.14; 107-121, | 35-38, 82-85, 211-214; |
| | | | 1.137; 15-22, | 214; Myristyl 128-133, |
| | | | 1.135; 214-221, | 147-152, 171-176, |
| | | | 1.134; 33-48, | 343-348; |
| | | | 1.126; 231-268, | Pkc_Phospho_Site 61-63, |
| | | | 1.118; 281-300, | 175-177, 181-183, |
| | | | 1.112; 178-184, | 277-279; |
| | | | 1.102; 197-203, | Tyr_Phospho_Site 65-73, |
| | | | 1.096; 347-353, | 230-238; |
| | | | 1.093; 368-376, | |
| | | | 1.091; 357-365, | |
| | | | 1.073; 94-100, | |
| | | | 1.05; 170-176, | |
| | | | 1.047 | |
| DEX0378_55.aa.5 | N | 0 - o | 76-101, 1.189; | Asn_Glycosylation 36-39; |
| | | | 33-60, 1.142; 6-25, | Ck2_Phospho_Site |
| | | | 1.112 | 100-103; |
| DEX0378_55.aa.10 | N | 0 - o | 107-118, 1.18; | Ck2_Phospho Site 33-36, |
| | | | 63-78, 1.141; 50-56, | 35-38, 82-85; |
| | | | 1.14; 15-22, | Myristyl 134-139; |
| | | | 1.135; 33-48, | Pkc_Phospho_Site 61-63; |
| | | | 1.126; 94-100, | Tyr_Phospho_Site |
| | | | 1.05 | 65-73; |
| DEX0378_55.aa.12 | N | 1 - o62- | 52-83, 1.228; 23-50, | Asn_Glycosylation 26-29; |
| | | 84i | 1.142; 4-15, | 29; Prokar_Lipoprotein |
| | | | 1.104 | 71-81; |
| DEX0378_55.aa.13 | N | 0 - o | 128-167, 1.15; | Asn_Glycosylation |
| | | | 290-323, 1.142; | 293-296; |
| | | | 63-78, 1.141; 50-56, | Ck2_Phospho_Site 33-36, |
| | | | 1.14; 107-121, | 35-38, 82-85, 211-214; |
| | | | 1.137; 15-22, | Myristyl 128-133, |
| | | | 1.135; 214-221, | 147-152, 171-176; |
| | | | 1.134; 33-48, | Pkc_Phospho_Site 61-63, |
| | | | 1.126; 231-282, | 175-177, 181-183; |
| | | | 1.118; 178-184, | Tyr_Phospho_Site 65-73, |
| | | | 1.102; 197-203, | 230-238; |
| | | | 1.096; 338-346, | |
| | | | 1.091; 327-335, | |
| | | | 1.073; 94-100, | |
| | | | 1.05; 170-176, | |
| | | | 1.047 | |
| DEX0378_55.aa.14 | N | 0 - o | 145-170, 1.189; | Asn_Glycosylation |
| | | | 102-129, 1.142; | 105-108; |
| | | | 8-15, 1.134; 25-62, | Ck2_Phospho_Site 169-172; |
| | | | 1.118; 75-94, | Pkc_Phospho_site |
| | | | 1.112 | 71-73; |
| | | | | Tyr_Phospho_Site 24-32; |
| DEX0378_55.aa.15 | N | 1 - | 337-368, 1.228; | Asn_Glycosylation |
| | | o347- | 128-167, 1.15; | 311-314; |
| | | 369i | 308-335, 1.142; | Ck2_Phospho_Site 33-36, |
| | | | 63-78, 1.141; 50-56, | 35-38, 82-85, 211-214; |
| | | | 1.14; 107-121, | Myristyl 128-133, |
| | | | 1.137; 15-22, | 147-152, 171-176; |
| | | | 1.135; 214-221, | Pkc_Phospho_Site 61-63, |
| | | | 1.134; 33-48, | 175-177, 181-183, |
| | | | 1.126; 231-268, | 277-279; |
| | | | 1.118; 281-300, | Tyr_Phospho_Site 65-73, |
| | | | 1.112; 178-184, | 230-238; |
| | | | 1.102; 197-203, | Prokar_Lipoprotein |
| | | | 1.096; 94-100, | 356-366; |
| | | | 1.05; 170-176, | |
| | | | 1.047 | |
| DEX0378_55.aa.16 | N | 0 - o | 128-167, 1.15; | Asn_Glycosylation |
| | | | 290-323, 1.142; | 293-296; |
| | | | 63-78, 1.141; 50-56, | Ck2_Phospho_Site 33-36, |
| | | | 1.14; 107-121, | 35-38, 82-85, 211-214; |
| | | | 1.137; 15-22, | Myristyl 128-133, |
| | | | 1.135; 214-221, | 147-152, 171-176; |
| | | | 1.134; 33-48, | Pkc_Phospho_Site 61-63, |
| | | | 1.126; 231-282, | 175-177, 181-183; |
| | | | 1.118; 178-184, | Tyr_Phospho_Site 65-73, |
| | | | 1.102; 197-203, | 230-238; |
| | | | 1.096; 350-357, | |
| | | | 1.096; 338-346, | |
| | | | 1.091; 327-335, | |
| | | | 1.073; 94-100, | |
| | | | 1.05; 170-176, | |
| | | | 1.047 | |
| DEX0378_59.aa.4 | N | 0 - o | 31-43, 1.255; 46-64, | Amidation 11-14, 67-70; |
| | | | 1.177; 9-28, | Asn_Glycosylation |
| | | | 1.17; 119-135, | 110-113; Myristyl 11-16, |
| | | | 1.159; 139-151, | 79-84, 83-88, 139-144; |
| | | | 1.14 | Pkc_Phospho_Site |
| | | | | 87-89, 121-123; |
| | | | | Lim_Domain_1 15-49; |
| DEX0378_59.aa.5 | N | 0 - o | 73-97, 1.179; | Amidation 121-124; |
| | | | 100-118, 1.177; | Camp_Phospho_Site 79-82; |
| | | | 15-53, 1.16; 64-70, | Ck2_Phospho_site |
| | | | 1.098 | 11-14; Myristyl 3-8, |
| | | | | 133-138, 137-142; |
| | | | | Pkc_Phospho_Site 71-73, |
| | | | | 78-80, 141-143; |
| | | | | Tyr_Phospho_Site 57-63; |
| DEX0378_59.aa.7 | N | 0 - o | 31-43, 1.255; 46-64, | Amidation 11-14, 67-70; |
| | | | 1.177; 9-28, | Asn_Glycosylation |
| | | | 1.17; 119-136, | 110-113; Myristyl 11-16, |
| | | | 1.159; 151-157, | 79-84, 83-88; |
| | | | 1.114 | Pkc_Phospho_Site 87-89, |
| | | | | 121-123; |
| | | | | Lim_Domain_1 15-49; |
| DEX0378_59.aa.8 | N | 0 - o | 59-72, 1.139; 25-32, | Camp_Phospho_Site 36-39, |
| | | | 1.109; 10-17, | 42-45, 75-78; |
| | | | 1.095; 46-55, | Ck2_Phospho_Site 24-27; |
| | | | 1.078 | Pkc_Phospho_Site |
| | | | | 45-47, 60-62, 83-85, |
| | | | | 94-96; |
| DEX0378_60.aa.2 | N | 0 - o | 5-19, 1.195; 23-38, | Ck2_Phospho_Site 24-27, |
| | | | 1.135 | 44-47; Myristyl |
| | | | | 55-60; |
| DEX0378_62.aa.2 | N | 0 - o | 102-124, 1.223; | Camp_Phospho_Site 72-75; |
| | | | 126-135, 1.17; | Myristyl 43-48; |
| | | | 79-97, 1.155; 20-34, | Pkc_Phospho_Site 70-72, |
| | | | 1.15; 140-148, | 71-73; |
| | | | 1.149; 56-75, | |
| | | | 1.11 | |
| DEX0378_64.aa.2 | N | 0 - o | 363-387, 1.22; | Asn_Glycosylation |
| | | | 303-314, 1.196; | 321-324; |
| | | | 72-80, 1.191; | Camp_Phospho_Site 11-14; |
| | | | 107-133, 1.187; | Ck2_Phospho_Site |
| | | | 343-351, 1.178; | 50-53, 73-76, 150-153, |
| | | | 421-433, 1.166; | 159-162, 166-169, 230-233, |
| | | | 98-105, 1.161; | 392-395; Myristyl |
| | | | 483-501, 1.144; | 71-76, 74-79, 151-156, |
| | | | 4-16, 1.136; 335-341, | 160-165, 319-324, 320-325, |
| | | | 1.13; 257-274, | 345-350, 346-351, |
| | | | 1.125; 244-251, | 413-418, 458-463; |
| | | | 1.124; 210-226, | Pkc_Phospho_Site 7-9, |
| | | | 1.113; 20-54, | 128-130, 245-247, 285-287, |
| | | | 1.111; 162-171, | Tyr_Phospho_Site |
| | | | 1.101; 150-159, | 306-313; |
| | | | 1.099; 282-301, | |
| | | | 1.093; 188-198, | |
| | | | 1.088; 320-327, | |
| | | | 1.085; 447-465, | |
| | | | 1.081; 56-62, | |
| | | | 1.075; 394-407, | |
| | | | 1.057 | |
| DEX0378_64.aa.3 | N | 0 - o | 363-387, 1.22; | Asn_Glycosylation |
| | | | 303-314, 1.196; | 321-324; |
| | | | 72-80, 1.191; | Camp_Phospho_Site 11-14, |
| | | | 107-133, 1.187; | 247-250; |
| | | | 343-351, 1.178; | Ck2_Phospho_Site 50-53, |
| | | | 241-251, 1.167; | 73-76, 150-153, |
| | | | 421-433, 1.166; | 159-162, 166-169, 230-233, |
| | | | 98-105, 1.161; | 392-395; Myristyl |
| | | | 483-501, 1.144; | 71-76, 74-79, 151-156, |
| | | | 4-16, 1.136; 335-341, | 160-165, 319-324, 320-325, |
| | | | 1.13; 257-274, | 345-350, 346-351, |
| | | | 1.125; 210-226, | 413-418, 458-463; |
| | | | 1.113; 20-54, | Pkc_Phospho_Site 7-9, |
| | | | 1.111; 162-171, | 128-130, 245-247, 285-287; |
| | | | 1.101; 150-159, | Tyr_Phospho_Site |
| | | | 1.099; 282-301, | 306-313; |
| | | | 1.093; 188-198, | |
| | | | 1.088; 320-327, | |
| | | | 1.085; 447-465, | |
| | | | 1.081; 56-62, | |
| | | | 1.075; 394-407, | |
| | | | 1.057 | |
| DEX0378_64.aa.10 | y | 0 - o | 7-25, 1.205; 51-65, | Asn_Glycosylation 84-87; |
| | | | 1.159; 82-93, | Myristyl 46-51; |
| | | | 1.133; 33-39, | Pkc_Phospho_Site 50-52; |
| | | | 1.11 | |
| DEX0378_70.aa.7 | N | 0 - o | 212-243, 1.254; | Amidation 91-94; |
| | | | 524-536, 1.229; | Asn_Glycosylation |
| | | | 451-469, 1.17; | 293-296, 371-374, 483-486, |
| | | | 190-210, 1.163; | 787-790, 817-820; |
| | | | 23-34, 1.162; | Camp_Phospho_Site |
| | | | 732-766, 1.152; | 453-456; |
| | | | 316-333, 1.15; | Ck2_Phospho_Site 111-114, |
| | | | 152-161, 1.147; | 187-190, 270-273, |
| | | | 401-422, 1.143; | 339-342, 352-355, 388-391, |
| | | | 591-603, 1.139; | 395-398, 405-408, |
| | | | 428-436, 1.13; | 427-430, 474-477, 528-531, |
| | | | 669-675, 1.129; | 617-620, 637-640, |
| | | | 294-304, 1.127; | 717-720, 726-729, 801-804, |
| | | | 340-373, 1.115; | 815-818; |
| | | | 251-269, 1.112; | Leucine_Zipper 11-32, |
| | | | 692-707, 1.111; | 60-81; Myristyl 321-326, |
| | | | 64-83, 1.109; | 478-483, 691-696; |
| | | | 621-631, 1.108; | Pkc_Phospho_Site 56-58, |
| | | | 551-562, 1.106; | 68-70, 167-169, |
| | | | 479-499, 1.104; | 193-195, 276-278, 400-402, |
| | | | 376-383, 1.102; | 510-512, 523-525, |
| | | | 564-588, 1.095; | 594-596, 696-698, 764-766, |
| | | | 178-184, 1.092; | 797-799, 798-800, |
| | | | 388-399, 1.088; | 829-831, 833-835, 838-840; |
| | | | 643-651, 1.084; | Tyr_Phospho_Site |
| | | | 806-812, 1.069; | 597-605; |
| | | | 606-613, 1.065; | |
| | | | 133-139, 1.065; | |
| | | | 501-521, 1.057; | |
| | | | 276-284, 1.054; | |
| | | | 7-20, 1.052; 97-107, | |
| | | | 1.047; 141-147, | |
| | | | 1.033 | |
| DEX0378_70.aa.13 | N | 0 - o | 87-109, 1.183; | Ck2_Phospho_Site 104-107; |
| | | | 139-149, 1.178; | Myristyl 38-43, |
| | | | 24-39, 1.117; | 42-47, 53-58, 54-59, |
| | | | 111-132, 1.11; | 71-76; |
| | | | 46-53, 1.09 | Pkc_Phospho_Site 58-60, |
| | | | | 68-70, 72-74, 79-81, |
| | | | | 80-82, 104-106; |
| DEX0378_70.aa.17 | N | 0 - o | 269-278, 1.182; | Amidation 91-94, 265-268 |
| | | | 233-262, 1.174; | 268; Asn_Glycosylation |
| | | | 23-34, 1.162; | 234-237; |
| | | | 152-161, 1.147; | Ck2_Phospho_Site 111-114, |
| | | | 192-210, 1.112; | 211-214; |
| | | | 64-83, 1.109; | Leucine_Zipper 11-32, |
| | | | 133-139, 1.065; | 60-81; |
| | | | 178-184, 1.06; | Pkc_Phospho_Site 56-58, |
| | | | 217-225, 1.054; | 68-70, 167-169, |
| | | | 7-20, 1.052; 97-107, | 217-219, 236-238; |
| | | | 1.047; 141-147, | |
| | | | 1. 033 | |
| DEX0378_70.aa.18 | N | 2 - o40- | 39-53, 1.226; 4-31, | Myristyl 16-21, 39-44; |
| | | 57i108- | 1.177; 108-130, | Pkc_Phospho_Site |
| | | 127o | 1.16 | 24-26, 96-98, 110-112; |
| DEX0378_80.aa.3 | N | 0 - o | 75-111, 1.174; | Zinc_Finger_C2h2 179-199, |
| | | | 199-208, 1.145; | 207-227, 235-255; |
| | | | 4-48, 1.142; 171-180, | Asn_Glycosylation 25-28; |
| | | | 1.137; 227-250, | Camp_Phospho_Site |
| | | | 1.127; 118-126, | 162-165; |
| | | | 1.107; 184-191, | Ck2_Phospho_Site 73-76, |
| | | | 1.101; 258-264, | 131-134, 173-176, |
| | | | 1.093; 58-64, | 198-201, 262-265; |
| | | | 1.088; 136-153, | Myristyl 82-87, 149-154; |
| | | | 1.069; 217-224, | Pkc_Phospho_Site |
| | | | 1.048 | 173-175, 262-264; |
| | | | | Tyr_Phospho_Site 197-205; |
| | | | | Cytochrome_C |
| | | | | 207-212; |
| DEX0378_80.aa.4 | N | 0 - o | 96-104, 1.15; 29-36, | Ck2_Phospho_Site 15-18, |
| | | | 1.133; 52-63, | 69-72, 79-82, 95-98; |
| | | | 1.094 | Leucine_Zipper |
| | | | | 60-81; |
| | | | | Tyr_Phospho_Site 30-38; |
| DEX0378_80.aa.5 | N | 0 - o | 62-98, 1.174; | Zinc_Finger_C2h2 166-186, |
| | | | 186-195, 1.145; | 194-214, 222-242; |
| | | | 18-35, 1.142; | Camp_Phospho_Site |
| | | | 158-167, 1.137; | 149-152; |
| | | | 214-236, 1.127; | Ck2_Phospho_Site 60-63, |
| | | | 105-113, 1.107; | 118-121, 160-163, |
| | | | 171-178, 1.101; | 185-188; Myristyl 69-74, |
| | | | 243-260, 1.095; | 136-141; |
| | | | 45-51, 1.088; | Pkc_Phospho_Site 160-162; |
| | | | 123-140, 1.069; | Tyr_Phospho_Site |
| | | | 5-13, 1.061; 204-211, | 184-192; Cytochrome_C |
| | | | 1.048 | 194-199; |
| DEX0378_85.aa.2 | N | 1 - o31- | 30-62, 1.275; 4-24, | Asn_Glycosylation 71-74, |
| | | 53i | 1.12 | Ck2_Phospho_Site |
| | | | | 30-33, 57-60; |
| | | | | Pkc_Phospho_Site 66-68; |

### Example 2

### Relative Quantitation of Gene Expression

[0435] Real-Time quantitative PCR with fluorescent Taqman® probes is a quantitation detection system utilizing the 5′-3′ nuclease activity of Taq DNA polymerase. The method uses an internal fluorescent oligonucleotide probe (Taqman®) labeled with a 5′ reporter dye and a downstream, 3′ quencher dye. During PCR, the 5′-3′ nuclease activity of Taq DNA polymerase releases the reporter, whose fluorescence can then be detected by the laser detector of the Model 7700 Sequence Detection System (PE Applied Biosystems, Foster City, Calif., USA). Amplification of an endogenous control is used to standardize the amount of sample RNA added to the reaction and normalize for Reverse Transcriptase (RT) efficiency. Either cyclophilin, glyceraldehyde-3-phosphate dehydrogenase (GAPDH), ATPase, or 18S ribosomal RNA (rRNA) is used as this endogenous control. To calculate relative quantitation between all the samples studied, the target RNA levels for one sample were used as the basis for comparative results (calibrator). Quantitation relative to the “calibrator” can be obtained using the comparative method (User Bulletin #2: ABI PRISM 7700 Sequence Detection System).

[0436] The tissue distribution and the level of the target gene are evaluated for every sample in normal and cancer tissues. Total RNA is extracted from normal tissues, cancer tissues, and from cancers and the corresponding matched adjacent tissues. Subsequently, first strand cDNA is prepared with reverse transcriptase and the polymerase chain reaction is done using primers and Taqman® probes specific to each target gene. The results are analyzed using the ABI PRISM 7700 Sequence Detector. The absolute numbers are relative levels of expression of the target gene in a particular tissue compared to the calibrator tissue.

[0437] One of ordinary skill can design appropriate primers. The relative levels of expression of the ESNA versus normal tissues and other cancer tissues can then be determined. All the values are compared to the calibrator. Normal RNA samples are commercially available pools, originated by pooling samples of a particular tissue from different individuals.

[0438] The relative levels of expression of the ESNA in pairs of matched samples may also be determined. A matched pair is formed by mRNA from the cancer sample for a particular tissue and mRNA from the normal adjacent sample for that same tissue from the same individual. All the values are compared to the calibrator.

[0439] In the analysis of matching samples, the ESNAs that show a high degree of tissue specificity for the tissue of interest These results confirm the tissue specificity results obtained with normal pooled samples. Further, the level of mRNA expression in cancer samples and the isogenic normal adjacent tissue from the same individual are compared. This comparison provides an indication of specificity for the cancer state (e.g. higher levels of mRNA expression in the cancer sample compared to the normal adjacent).

[0440] Altogether, the high level of tissue specificity, plus the mRNA overexpression in matched samples tested are indicative of SEQ ID NO: 1-419 being a diagnostic marker for cancer.

### Example 3

### Protein Expression

[0441] The ESNA is amplified by polymerase chain reaction (PCR) and the amplified DNA fragment encoding the ESNA is subcloned in pET-21d for expression in E. coli. In addition to the ESNA coding sequence, codons for two amino acids, Met-Ala, flanking the NH₂-terminus of the coding sequence of ESNA, and six histidines, flanking the COOH-terminus of the coding sequence of ESNA, are incorporated to serve as initiating Met/restriction site and purification tag, respectively.

[0442] An over-expressed protein band of the appropriate molecular weight may be observed on a Coomassie blue stained polyacrylamide gel. This protein band is confirmed by Western blot analysis using monoclonal antibody against 6× Histidine tag.

[0443] Large-scale purification of ESP is achieved using cell paste generated from 6-liter bacterial cultures, and purified using immobilized metal affinity chromatography (IMAC). Soluble fractions that are separated from total cell lysate were incubated with a nickel chelating resin. The column is packed and washed with five column volumes of wash buffer. ESP is eluted stepwise with various concentration imidazole buffers.

### Example 4

### Fusion Proteins

[0444] The human Fc portion of the IgG molecule can be PCR amplified, using primers that span the 5′ and 3′ ends of the sequence described below. These primers also should have convenient restriction enzyme sites that will facilitate cloning into an expression vector, preferably a mammalian expression vector. For example, if pC4 (Accession No. 209646) is used, the human Fc portion can be ligated into the BamHI cloning site. Note that the 3′ BamHI site should be destroyed. Next, the vector containing the human Fc portion is re-restricted with BamHI, linearizing the vector, and a polynucleotide of the present invention, isolated by the PCR protocol described in Example 2, is ligated into this BamHI site. Note that the polynucleotide is cloned without a stop codon, otherwise a fusion protein will not be produced. If the naturally occurring signal sequence is used to produce the secreted protein, pC4 does not need a second signal peptide. Alternatively, if the naturally occurring signal sequence is not used, the vector can be modified to include a heterologous signal sequence. See, e.g., WO 96/34891.

### Example 5

### Production of an Antibody from a Polypeptide

[0445] In general, such procedures involve immunizing an animal (preferably a mouse) with polypeptide or, more preferably, with a secreted polypeptide-expressing cell. Such cells may be cultured in any suitable tissue culture medium; however, it is preferable to culture cells in Earle's modified Eagle's medium supplemented with 10% fetal bovine serum (inactivated at about 56° C.), and supplemented with about 10 g/l of nonessential amino acids, about 1,000 U/ml of penicillin, and about 100, μg/ml of streptomycin. The splenocytes of such mice are extracted and fused with a suitable myeloma cell line. Any suitable myeloma cell line may be employed in accordance with the present invention; however, it is preferable to employ the parent myeloma cell line (SP20), available from the ATCC. After fusion, the resulting hybridoma cells are selectively maintained in HAT medium, and then cloned by limiting dilution as described by Wands et al., Gastroenterology 80: 225-232 (1981).

[0446] The hybridoma cells obtained through such a selection are then assayed to identify clones which secrete antibodies capable of binding the polypeptide. Alternatively, additional antibodies capable of binding to the polypeptide can be produced in a two-step procedure using anti-idiotypic antibodies. Such a method makes use of the fact that antibodies are themselves antigens, and therefore, it is possible to obtain an antibody which binds to a second antibody. In accordance with this method, protein specific antibodies are used to immunize an animal, preferably a mouse. The splenocytes of such an animal are then used to produce hybridoma cells, and the hybridoma cells are screened to identify clones which produce an antibody whose ability to bind to the protein-specific antibody can be blocked by the polypeptide. Such antibodies comprise anti-idiotypic antibodies to the protein specific antibody and can be used to immunize an animal to induce formation of further protein-specific antibodies.

### Example 6

### Method of Determining Alterations in a Gene Corresponding to a Polynucleotide

[0447] RNA is isolated from individual patients or from a family of individuals that have a phenotype of interest. cDNA is then generated from these RNA samples using protocols known in the art. See, Sambrook (2001), supra. The cDNA is then used as a template for PCR, employing primers surrounding regions of interest in SEQ ID NO: 1-419. Suggested PCR conditions consist of 35 cycles at 95° C. for 30 seconds; 60-120 seconds at 52-58° C.; and 60-120 seconds at 70° C., using buffer solutions described in Sidransky et al., Science 252(5006): 706-9 (1991). See also Sidransky et al., Science 278(5340): 1054-9 (1997).

[0448] PCR products are then sequenced using primers labeled at their 5′ end with T4 polynucleotide kinase, employing SequiTherm Polymerase. (Epicentre Technologies). The intron-exon borders of selected exons are also determined and genomic PCR products analyzed to confirm the results. PCR products harboring suspected mutations are then cloned and sequenced to validate the results of the direct sequencing. PCR products is cloned into T-tailed vectors as described in Holton et al., Nucleic Acids Res., 19: 1156 (1991) and sequenced with T7 polymerase (United States Biochemical). Affected individuals are identified by mutations not present in unaffected individuals.

[0449] Genomic rearrangements may also be determined. Genomic clones are nick-translated with digoxigenin deoxyuridine 5′ triphosphate (Boehringer Manheim), and FISH is performed as described in Johnson et al., Methods Cell Biol. 35: 73-99 (1991). Hybridization with the labeled probe is carried out using a vast excess of human cot-1 DNA for specific hybridization to the corresponding genomic locus.

[0450] Chromosomes are counterstained with 4,6-diamino-2-phenylidole and propidium iodide, producing a combination of C-and R-bands. Aligned images for precise mapping are obtained using a triple-band filter set (Chroma Technology, Brattleboro, Vt.) in combination with a cooled charge-coupled device camera (Photometrics, Tucson, Ariz.) and variable excitation wavelength filters. Johnson (1991). Image collection, analysis and chromosomal fractional length measurements are performed using the ISee Graphical Program System. (Inovision Corporation, Durham, N.C.) Chromosome alterations of the genomic region hybridized by the probe are identified as insertions, deletions, and translocations. These alterations are used as a diagnostic marker for an associated disease.

### Example 7

### Method of Detecting Abnormal Levels of a Polypeptide in a Biological Sample

[0451] Antibody-sandwich ELISAs are used to detect polypeptides in a sample, preferably a biological sample. Wells of a microtiter plate are coated with specific antibodies, at a final concentration of 0.2 to 10 ug/ml. The antibodies are either monoclonal or polyclonal and are produced by the method described above. The wells are blocked so that non-specific binding of the polypeptide to the well is reduced. The coated wells are then incubated for >2 hours at RT with a sample containing the polypeptide. Preferably, serial dilutions of the sample should be used to validate results. The plates are then washed three times with deionized or distilled water to remove unbound polypeptide. Next, 50 μl of specific antibody-alkaline phosphatase conjugate, at a concentration of 25-400 ng, is added and incubated for 2 hours at room temperature. The plates are again washed three times with deionized or distilled water to remove unbound conjugate. 75 μl of 4-methylumbelliferyl phosphate (MUP) or p-nitrophenyl phosphate (NPP) substrate solution are added to each well and incubated 1 hour at room temperature.

[0452] The reaction is measured by a microtiter plate reader. A standard curve is prepared, using serial dilutions of a control sample, and polypeptide concentrations are plotted on the X-axis (log scale) and fluorescence or absorbance on the Y-axis (linear scale). The concentration of the polypeptide in the sample is calculated using the standard curve.

### Example 8

### Formulating a Polypeptide

[0453] The secreted polypeptide composition will be formulated and dosed in a fashion consistent with good medical practice, taking into account the clinical condition of the individual patient (especially the side effects of treatment with the secreted polypeptide alone), the site of delivery, the method of administration, the scheduling of administration, and other factors known to practitioners. The “effective amount” for purposes herein is thus determined by such considerations.

[0454] As a general proposition, the total pharmaceutically effective amount of secreted polypeptide administered parenterally per dose will be in the range of about 1, μg/kg/day to 10 mg/kg/day of patient body weight, although, as noted above, this will be subject to therapeutic discretion. More preferably, this dose is at least 0.01 mg/kg/day, and most preferably for humans between about 0.01 and 1 mg/kg/day for the hormone. If given continuously, the secreted polypeptide is typically administered at a dose rate of about 1 μg/kg/hour to about 50 mg/kg/hour, either by 14 injections per day or by continuous subcutaneous infusions, for example, using a mini-pump. An intravenous bag solution may also be employed. The length of treatment needed to observe changes and the interval following treatment for responses to occur appears to vary depending on the desired effect.

[0455] Pharmaceutical compositions containing the secreted protein of the invention are administered orally, rectally, parenterally, intracistemally, intravaginally, intraperitoneally, topically (as by powders, ointments, gels, drops or transdermal patch), bucally, or as an oral or nasal spray. “Pharmaceutically acceptable carrier” refers to a non-toxic solid, semisolid or liquid filler, diluent, encapsulating material or formulation auxiliary of any type. The term “parenteral” as used herein refers to modes of administration which include intravenous, intramuscular, intraperitoneal, intrasternal, subcutaneous and intraarticular injection and infusion.

[0456] The secreted polypeptide is also suitably administered by sustained-release systems. Suitable examples of sustained-release compositions include semipermeable polymer matrices in the form of shaped articles, e.g., films, or microcapsules. Sustained-release matrices include polylactides (U.S. Pat. No. 3,773,919, EP 58,481, the contents of which are hereby incorporated by reference herein in their entirety), copolymers of L-glutamic acid and gamma-ethyl-L-glutamate (Sidman, U. et al., Biopolymers 22: 547-556 (1983)), poly (2-hydroxyethyl methacrylate) (R. Langer et al., J. Biomed. Mater. Res. 15: 167-277 (1981), and R. Langer, Chem. Tech. 12: 98-105 (1982)), ethylene vinyl acetate (R. Langer et al.) or poly-D- (−)-3-hydroxybutyric acid (EP 133,988). Sustained-release compositions also include liposomally entrapped polypeptides. Liposomes containing the secreted polypeptide are prepared by methods known per se: DE Epstein et al., Proc. Natl. Acad. Sci. USA 82: 3688-3692 (1985); Hwang et al., Proc. Natl. Acad. Sci. USA 77: 4030-4034 (1980); EP 52,322; EP 36,676; EP 88,046; EP 143,949; EP 142,641; Japanese Pat. Appl. 83-118008; U.S. Pat. Nos. 4,485,045 and 4,544,545; and EP 102,324, the contents of which are hereby incorporated by reference herein in their entirety. Ordinarily, the liposomes are of the small (about 200-800 Angstroms) unilamellar type in which the lipid content is greater than about 30 mol. percent cholesterol, the selected proportion being adjusted for the optimal secreted polypeptide therapy.

[0457] For parenteral administration, in one embodiment, the secreted polypeptide is formulated generally by mixing it at the desired degree of purity, in a unit dosage injectable form (solution, suspension, or emulsion), with a pharmaceutically acceptable carrier, i.e., one that is non-toxic to recipients at the dosages and concentrations employed and is compatible with other ingredients of the formulation.

[0458] For example, the formulation preferably does not include oxidizing agents and other compounds that are known to be deleterious to polypeptides. Generally, the formulations are prepared by contacting the polypeptide uniformly and intimately with liquid carriers or finely divided solid carriers or both. Then, if necessary, the product is shaped into the desired formulation. Preferably, the carrier is a parenteral carrier, more preferably, a solution that is isotonic with the blood of the recipient. Examples of such carrier vehicles include water, saline, Ringer's solution, and dextrose solution. Non-aqueous vehicles such as fixed oils and ethyl oleate are also useful herein, as well as liposomes.

[0459] The carrier suitably contains minor amounts of additives such as substances that enhance isotonicity and chemical stability. Such materials are non-toxic to recipients at the dosages and concentrations employed, and include buffers such as phosphate, citrate, succinate, acetic acid, and other organic acids or their salts; antioxidants such as ascorbic acid; low molecular weight (less than about ten residues) polypeptides, e.g., polyarginine or tripeptides; proteins, such as serum albumin, gelatin, or immunoglobulins; hydrophilic polymers such as polyvinylpyrrolidone; amino acids, such as glycine, glutamic acid, aspartic acid, or arginine; monosaccharides, disaccharides, and other carbohydrates including cellulose or its derivatives, glucose, manose, or dextrins; chelating agents such as EDTA; sugar alcohols such as mannitol or sorbitol; counterions such as sodium; and/or nonionic surfactants such as polysorbates, poloxamers, or PEG.

[0460] The secreted polypeptide is typically formulated in such vehicles at a concentration of about 0.1 mg/ml to 100 mg/ml, preferably 1-10 mg/ml, at a pH of about 3 to 8. It will be understood that the use of certain of the foregoing excipients, carriers, or stabilizers will result in the formation of polypeptide salts.

[0461] Any polypeptide to be used for therapeutic administration can be sterile. Sterility is readily accomplished by filtration through sterile filtration membranes (e.g., 0.2 micron membranes). Therapeutic polypeptide compositions generally are placed into a container having a sterile access port, for example, an intravenous solution bag or vial having a stopper pierceable by a hypodermic injection needle.

[0462] Polypeptides ordinarily will be stored in unit or multi-dose containers, for example, sealed ampules or vials, as an aqueous solution or as a lyophilized formulation for reconstitution. As an example of a lyophilized formulation, 10-ml vials are filled with 5 ml of sterile-filtered 1% (w/v) aqueous polypeptide solution, and the resulting mixture is lyophilized. The infusion solution is prepared by reconstituting the lyophilized polypeptide using bacteriostatic Water-for-Injection.

[0463] The invention also provides a pharmaceutical pack or kit comprising one or more containers filled with one or more of the ingredients of the pharmaceutical compositions of the invention. Associated with such container (s) can be a notice in the form prescribed by a governmental agency regulating the manufacture, use or sale of pharmaceuticals or biological products, which notice reflects approval by the agency of manufacture, use or sale for human administration. In addition, the polypeptides of the present invention may be employed in conjunction with other therapeutic compounds.

### Example 9

### Method of Treating Decreased Levels of the Polypeptide

[0464] It will be appreciated that conditions caused by a decrease in the standard or normal expression level of a secreted protein in an individual can be treated by administering the polypeptide of the present invention, preferably in the secreted form. Thus, the invention also provides a method of treatment of an individual in need of an increased level of the polypeptide comprising administering to such an individual a pharmaceutical composition comprising an amount of the polypeptide to increase the activity level of the polypeptide in such an individual.

[0465] For example, a patient with decreased levels of a polypeptide receives a daily dose 0.1-100 ug/kg of the polypeptide for six consecutive days. Preferably, the polypeptide is in the secreted form. The exact details of the dosing scheme, based on administration and formulation, are provided above.

### Example 10

### Method of Treating Increased Levels of the Polypeptide

[0466] Antisense or RNAi technology are used to inhibit production of a polypeptide of the present invention. This technology is one example of a method of decreasing levels of a polypeptide, preferably a secreted form, due to a variety of etiologies, such as cancer.

[0467] For example, a patient diagnosed with abnormally increased levels of a polypeptide is administered intravenously antisense polynucleotides at 0.5, 1.0, 1.5, 2.0 and 3.0 mg/kg day for 21 days. This treatment is repeated after a 7-day rest period if the treatment was well tolerated. The formulation of the antisense polynucleotide is provided above.

### Example 11

### Method of Treatment Using Gene Therapy

[0468] One method of gene therapy transplants fibroblasts, which are capable of expressing a polypeptide, onto a patient. Generally, fibroblasts are obtained from a subject by skin biopsy. The resulting tissue is placed in tissue-culture medium and separated into small pieces. Small chunks of the tissue are placed on a wet surface of a tissue culture flask, approximately ten pieces are placed in each flask. The flask is tamed upside down, closed tight and left at room temperature over night. After 24 hours at room temperature, the flask is inverted and the chunks of tissue remain fixed to the bottom of the flask and fresh media (e.g., Ham's F12 media, with 10% FBS, penicillin and streptomycin) is added. The flasks are then incubated at 37° C. for approximately one week.

[0469] At this time, fresh media is added and subsequently changed every several days. After an additional two weeks in culture, a monolayer of fibroblasts emerge. The monolayer is trypsinized and scaled into larger flasks. pMV-7 (Kirschmeier, P. T. et al., DNA, 7: 219-25 (1988)), flanked by the long terminal repeats of the Moloney murine sarcoma virus, is digested with EcoRI and HindIII and subsequently treated with calf intestinal phosphatase. The linear vector is fractionated on agarose gel and purified, using glass beads.

[0470] The cDNA encoding a polypeptide of the present invention can be amplified using PCR primers which correspond to the 5′ and 3′end sequences respectively as set forth in Example 3. Preferably, the 5′primer contains an EcoRI site and the 3′primer includes a HindIII site. Equal quantities of the Moloney murine sarcoma virus linear backbone and the amplified EcoRI and HindIII fragment are added together, in the presence of T4 DNA ligase. The resulting mixture is maintained under conditions appropriate for ligation of the two fragments. The ligation mixture is then used to transform bacteria HB 101, which are then plated onto agar containing kanamycin for the purpose of confirming that the vector has the gene of interest properly inserted.

[0471] The amphotropic pA317 or GP+am12 packaging cells are grown in tissue culture to confluent density in Dulbecco's Modified Eagles Medium (DMEM) with 10% calf serum (CS), penicillin and streptomycin. The MSV vector containing the gene is then added to the media and the packaging cells transduced with the vector. The packaging cells now produce infectious viral particles containing the gene (the packaging cells are now referred to as producer cells).

[0472] Fresh media is added to the transduced producer cells, and subsequently, the media is harvested from a 10 cm plate of confluent producer cells. The spent media, containing the infectious viral particles, is filtered through a millipore filter to remove detached producer cells and this media is then used to infect fibroblast cells. Media is removed from a sub-confluent plate of fibroblasts and quickly replaced with the media from the producer cells. This media is removed and replaced with fresh media.

[0473] If the titer of virus is high, then virtually all fibroblasts will be infected and no selection is required. If the titer is very low, then it is necessary to use a retroviral vector that has a selectable marker, such as neo or his. Once the fibroblasts have been efficiently infected, the fibroblasts are analyzed to determine whether protein is produced.

[0474] The engineered fibroblasts are then transplanted onto the host, either alone or after having been grown to confluence on cytodex 3 microcarrier beads.

### Example 12

### Method of Treatment Using Gene Therapy—In Vivo

[0475] Another aspect of the present invention is using in vivo gene therapy methods to treat disorders, diseases and conditions. The gene therapy method relates to the introduction of naked nucleic acid (DNA, RNA, and antisense DNA or RNA) sequences into an animal to increase or decrease the expression of the polypeptide.

[0476] The polynucleotide of the present invention may be operatively linked to a promoter or any other genetic elements necessary for the expression of the polypeptide by the target tissue. Such gene therapy and delivery techniques and methods are known in the art, see, for example, Tabata H. et al. Cardiovasc. Res. 35 (3): 470-479 (1997); Chao J et al. Pharmacol. Res. 35 (6): 517-522 (1997); Wolff J. A. Neuromuscul. Disord. 7(5): 314-318 (1997), Schwartz B. et al. Gene Ther. 3 (5): 405411 (1996); and Tsurumi Y. et al. Circulation 94 (12): 3281-3290 (1996); WO 90/11092, WO 98/11779; U.S. Pat. Nos. 5,693,622; 5,705,151; 5,580,859, the contents of which are hereby incorporated by reference herein in their entirety.

[0477] The polynucleotide constructs may be delivered by any method that delivers injectable materials to the cells of an animal, such as, injection into the interstitial space of tissues (heart, muscle, skin, endometrial, liver, intestine and the like). The polynucleotide constructs can be delivered in a pharmaceutically acceptable liquid or aqueous carrier.

[0478] The term “naked” polynucleotide, DNA or RNA, refers to sequences that are free from any delivery vehicle that acts to assist, promote, or facilitate entry into the cell, including viral sequences, viral particles, liposome formulations, lipofectin or precipitating agents and the like. However, the polynucleotides of the present invention may also be delivered in liposome formulations (such as those taught in Felgner P. L. et al. Ann. NY Acad. Sci. 772: 126-139 (1995) and Abdallah B. et al. Biol. Cell 85 (1): 1-7 (1995)) which can be prepared by methods well known to those skilled in the art.

[0479] The polynucleotide vector constructs used in the gene therapy method are preferably constructs that will not integrate into the host genome nor will they contain sequences that allow for replication. Any strong promoter known to those skilled in the art can be used for driving the expression of DNA. Unlike other gene therapies techniques, one major advantage of introducing naked nucleic acid sequences into target cells is the transitory nature of the polynucleotide synthesis in the cells. Studies have shown that non-replicating DNA sequences can be introduced into cells to provide production of the desired polypeptide for periods of up to six months.

[0480] The polynucleotide construct can be delivered to the interstitial space of tissues within the an animal, including of muscle, skin, brain, endometrial, liver, spleen, bone marrow, thymus, heart, lymph, blood, bone, cartilage, pancreas, kidney, gall bladder, stomach, intestine, testis, ovary, uterus, rectum, nervous system, eye, gland, and connective tissue. Interstitial space of the tissues comprises the intercellular fluid, mucopolysaccharide matrix among the reticular fibers of organ tissues, elastic fibers in the walls of vessels or chambers, collagen fibers of fibrous tissues, or that same matrix within connective tissue ensheathing muscle cells or in the lacunae of bone. It is similarly the space occupied by the plasma of the circulation and the lymph fluid of the lymphatic channels. Delivery to the interstitial space of muscle tissue is preferred for the reasons discussed below. They may be conveniently delivered by injection into the tissues comprising these cells. They are preferably delivered to and expressed in persistent, non-dividing cells which are differentiated, although delivery and expression may be achieved in non-differentiated or less completely differentiated cells, such as, for example, stem cells of blood or skin fibroblasts. In vivo muscle cells are particularly competent in their ability to take up and express polynucleotides.

[0481] For the naked polynucleotide injection, an effective dosage amount of DNA or RNA will be in the range of from about 0.05 μg/kg body weight to about 50 mg/kg body weight. Preferably the dosage will be from about 0.005 mg/kg to about 20 mg/kg and more preferably from about 0.05 mg/kg to about 5 mg/kg. Of course, as the artisan of ordinary skill will appreciate, this dosage will vary according to the tissue site of injection. The appropriate and effective dosage of nucleic acid sequence can readily be determined by those of ordinary skill in the art and may depend on the condition being treated and the route of administration. The preferred route of administration is by the parenteral route of injection into the interstitial space of tissues. However, other parenteral routes may also be used, such as, inhalation of an aerosol formulation particularly for delivery to endometrials or bronchial tissues, throat or mucous membranes of the nose. In addition, naked polynucleotide constructs can be delivered to arteries during angioplasty by the catheter used in the procedure.

[0482] The dose response effects of injected polynucleotide in muscle in vivo is determined as follows. Suitable template DNA for production of mRNA coding for polypeptide of the present invention is prepared in accordance with a standard recombinant DNA methodology. The template DNA, which may be either circular or linear, is either used as naked DNA or complexed with liposomes. The quadriceps muscles of mice are then injected with various amounts of the template DNA.

[0483] Five to six week old female and male Balb/C mice are anesthetized by intraperitoneal injection with 0.3 ml of 2.5% Avertin. A 1.5 cm incision is made on the anterior thigh, and the quadriceps muscle is directly visualized. The template DNA is injected in 0.1 ml of carrier in a 1 cc syringe through a 27 gauge needle over one minute, approximately 0.5 cm from the distal insertion site of the muscle into the knee and about 0.2 cm deep. A suture is placed over the injection site for future localization, and the skin is closed with stainless steel clips.

[0484] After an appropriate incubation time (e.g., 7 days) muscle extracts are prepared by excising the entire quadriceps. Every fifth 15 um cross-section of the individual quadriceps muscles is histochemically stained for protein expression. A time course for protein expression may be done in a similar fashion except that quadriceps from different mice are harvested at different times. Persistence of DNA in muscle following injection may be determined by Southern blot analysis after preparing total cellular DNA and HIRT supernatants from injected and control mice.

[0485] The results of the above experimentation in mice can be use to extrapolate proper dosages and other treatment parameters in humans and other animals using naked DNA.

### Example 13

### Transgenic Animals

[0486] The polypeptides of the invention can also be expressed in transgenic animals. Animals of any species, including, but not limited to, mice, rats, rabbits, hamsters, guinea pigs, pigs, micro-pigs, goats, sheep, cows and non-human primates, e.g., baboons, monkeys, and chimpanzees may be used to generate transgenic animals. In a specific embodiment, techniques described herein or otherwise known in the art, are used to express polypeptides of the invention in humans, as part of a gene therapy protocol.

[0487] Any technique known in the art may be used to introduce the transgene (I.e., polynucleotides of the invention) into animals to produce the founder lines of transgenic animals. Such techniques include, but are not limited to, pronuclear microinjection (Paterson et al., Appl. Microbiol. Biotechnol. 40: 691-698 (1994); Carver et al., Biotechnology 11: 1263-1270 (1993); Wright et al., Biotechnology 9: 830-834 (1991); and U.S. Pat. No. 4,873,191, the contents of which is hereby incorporated by reference herein in its entirety); retrovirus mediated gene transfer into germ lines (Van der Putten et al., Proc. Natl. Acad. Sci., USA 82: 6148-6152 (1985)), blastocysts or embryos; gene targeting in embryonic stem cells (Thompson et al., Cell 56: 313-321 (1989)); electroporation of cells or embryos (Lo, 1983, Mol Cell. Biol. 3: 1803-1814 (1983)); introduction of the polynucleotides of the invention using a gene gun (see, e.g., Ulmer et al., Science 259: 1745 (1993); introducing nucleic acid constructs into embryonic pleuripotent stem cells and transferring the stem cells back into the blastocyst; and sperm mediated gene transfer (Lavitrano et al., Cell 57: 717-723 (1989). For a review of such techniques, see Gordon, “Transgenic Animals,” Intl. Rev. Cytol. 115: 171-229 (1989).

[0488] Any technique known in the art may be used to produce transgenic clones containing polynucleotides of the invention, for example, nuclear transfer into enucleated oocytes of nuclei from cultured embryonic, fetal, or adult cells induced to quiescence (Campell et al., Nature 380: 64-66 (1996); Wilmut et al., Nature 385: 810813 (1997)).

[0489] The present invention provides for transgenic animals that carry the transgene in all their cells, as well as animals which carry the transgene in some, but not all their cells, I.e., mosaic animals or chimeric. The transgene may be integrated as a single transgene or as multiple copies such as in concatamers, e.g., head-to-head tandems or head-to-tail tandems. The transgene may also be selectively introduced into and activated in a particular cell type by following, for example, the teaching of Lasko et al. (Lasko et al., Proc. Natl. Acad. Sci. USA 89: 6232-6236 (1992)). The regulatory sequences required for such a cell-type specific activation will depend upon the particular cell type of interest, and will be apparent to those of skill in the art. When it is desired that the polynucleotide transgene be integrated into the chromosomal site of the endogenous gene, gene targeting is preferred. Briefly, when such a technique is to be utilized, vectors containing some nucleotide sequences homologous to the endogenous gene are designed for the purpose of integrating, via homologous recombination with chromosomal sequences, into and disrupting the function of the nucleotide sequence of the endogenous gene. The transgene may also be selectively introduced into a particular cell type, thus inactivating the endogenous gene in only that cell type, by following, for example, the teaching of Gu et al. (Gu et al., Science 265: 103-106 (1994)). The regulatory sequences required for such a cell-type specific inactivation will depend upon the particular cell type of interest, and will be apparent to those of skill in the art.

[0490] Once transgenic animals have been generated, the expression of the recombinant gene may be assayed utilizing standard techniques. Initial screening may be accomplished by Southern blot analysis or PCR techniques to analyze animal tissues to verify that integration of the transgene has taken place. The level of mRNA expression of the transgene in the tissues of the transgenic animals may also be assessed using techniques which include, but are not limited to, Northern blot analysis of tissue samples obtained from the animal, in situ hybridization analysis, and reverse transcriptase-PCR (rt-PCR). Samples of transgenic gene-expressing tissue may also be evaluated immunocytochemically or immunohistochemically using antibodies specific for the transgene product.

[0491] Once the founder animals are produced, they may be bred, inbred, outbred, or crossbred to produce colonies of the particular animal. Examples of such breeding strategies include, but are not limited to: outbreeding of founder animals with more than one integration site in order to establish separate lines; inbreeding of separate lines in order to produce compound transgenics that express the transgene at higher levels because of the effects of additive expression of each transgene; crossing of heterozygous transgenic animals to produce animals homozygous for a given integration site in order to both augment expression and eliminate the need for screening of animals by DNA analysis; crossing of separate homozygous lines to produce compound heterozygous or homozygous lines; and breeding to place the transgene on a distinct background that is appropriate for an experimental model of interest.

[0492] Transgenic animals of the invention have uses which include, but are not limited to, animal model systems useful in elaborating the biological function of polypeptides of the present invention, studying conditions and/or disorders associated with aberrant expression, and in screening for compounds effective in ameliorating such conditions and/or disorders.

### Example 14

### Knock-Out Animals

[0493] Endogenous gene expression can also be reduced by inactivating or “knocking out” the gene and/or its promoter using targeted homologous recombination. (E.g., see Smithies et al., Nature 317: 230-234 (1985); Thomas & Capecchi, Cell 51: 503512 (1987); Thompson et al., Cell 5: 313-321 (1989)) Alternatively, RNAi technology may be used. For example, a mutant, non-functional polynucleotide of the invention (or a completely unrelated DNA sequence) flanked by DNA homologous to the endogenous polynucleotide sequence (either the coding regions or regulatory regions of the gene) can be used, with or without a selectable marker and/or a negative selectable marker, to transfect cells that express polypeptides of the invention in vivo. In another embodiment, techniques known in the art are used to generate knockouts in cells that contain, but do not express the gene of interest. Insertion of the DNA construct, via targeted homologous recombination, results in inactivation of the targeted gene. Such approaches are particularly suited in research and agricultural fields where modifications to embryonic stem cells can be used to generate animal offspring with an inactive targeted gene (e.g., see Thomas & Capecchi 1987 and Thompson 1989, supra). However, this approach can be routinely adapted for use in humans provided the recombinant DNA constructs are directly administered or targeted to the required site in vivo using appropriate viral vectors that will be apparent to those of skill in the art.

[0494] In further embodiments of the invention, cells that are genetically engineered to express the polypeptides of the invention, or alternatively, that are genetically engineered not to express the polypeptides of the invention (e.g., knockouts) are administered to a patient in vivo. Such cells may be obtained from the patient (i.e., animal, including human) or an MHC compatible donor and can include, but are not limited to fibroblasts, bone marrow cells, blood cells (e.g., lymphocytes), adipocytes, muscle cells, endothelial cells etc. The cells are genetically engineered in vitro using recombinant DNA techniques to introduce the coding sequence of polypeptides of the invention into the cells, or alternatively, to disrupt the coding sequence and/or endogenous regulatory sequence associated with the polypeptides of the invention, e.g., by transduction (using viral vectors, and preferably vectors that integrate the transgene into the cell genome) or transfection procedures, including, but not limited to, the use of plasmids, cosmids, YACs, naked DNA, electroporation, liposomes, etc.

[0495] The coding sequence of the polypeptides of the invention can be placed under the control of a strong constitutive or inducible promoter or promoter/enhancer to achieve expression, and preferably secretion, of the polypeptides of the invention. The engineered cells which express and preferably secrete the polypeptides of the invention can be introduced into the patient systemically, e.g., in the circulation, or intraperitoneally.

[0496] Alternatively, the cells can be incorporated into a matrix and implanted in the body, e.g., genetically engineered fibroblasts can be implanted as part of a skin graft; genetically engineered endothelial cells can be implanted as part of a lymphatic or vascular graft. (See, for example, Anderson et al. U.S. Pat. No. 5,399,349; and Mulligan & Wilson, U.S. Pat. No. 5,460,959, the contents of which are hereby incorporated by reference herein in their entirety).

[0497] When the cells to be administered are non-autologous or non-MHC compatible cells, they can be administered using well known techniques which prevent the development of a host immune response against the introduced cells. For example, the cells may be introduced in an encapsulated form which, while allowing for an exchange of components with the immediate extracellular environment, does not allow the introduced cells to be recognized by the host immune system.

[0498] Transgenic and “knock-out” animals of the invention have uses which include, but are not limited to, animal model systems useful in elaborating the biological function of polypeptides of the present invention, studying conditions and/or disorders associated with aberrant expression, and in screening for compounds effective in ameliorating such conditions and/or disorders.

[0499] While preferred illustrative embodiments of the present invention are described, one skilled in the art will appreciate that the present invention can be practiced by other than the described embodiments, which are presented for purposes of illustration only and not by way of limitation. The present invention is limited only by the claims that follow.

The application's sequence listing, which the Patent Office published only in electronic form, follows.

SEQUENCE LISTING (600 sequences)

SEQ ID NO: 1 - DNA, 231 bp, Homo sapien
attatattcacttctgtactcttttatatatttgaagtatttagtgacaaaagcatacaaaatttaagacctggaaaataatttctagccgaggtaaaaacttcattgtataattctgagtaggtattcttctttacattcattcttgttttaaataaatagttactcccatgcatgtaaatacagtttccaattttatttgccattgctaatataaagtacttatttgta

SEQ ID NO: 2 - DNA, 231 bp, Homo sapien; identical to SEQ ID NO: 1

SEQ ID NO: 3 - DNA, 1585 bp, Homo sapien
actgcgatgcacctcttaccacatgcctccctggcaggcagggtctccactttttacaaatttgcctgagaccattcctcaggtcattcaggtggtcatggcccagccaggctttgaacccaggctgtgcgattccacagctggcgctctggcctgtgtgcctcatgatcatggatacagcatctattcttattttttcatgtagtcctggggtacttagcaccgtggcatatctgtaataagcacatgcacacctcgaaggaggtcttcacttcaacatacgagttgaccatggcatgctctgggctccagtcctctacaaagacgtagggcaggaactaccagttgtcagcacagcaccatcccacattgctcttctaatggagcctttcaccccagatgttctttctcgtctgatgggaaggatccaagtatgtaaagattatgttatagatcagctttggtctgtcctaaaagaaatttgccagtggattattccatatggataaaagtcagtttctctggtcttcctggaatgtgtctagaaagcaaatagattatttacaagttcatagtagatcaatgtattggattaaaatatgacaaacataatttggtcattgtgagcatgccagcttggtcaactattcaccacacatgatgccctaaatataactctaggttttcttatgcccaagagagggacatactcttgggtgtctggactagggaaacatgtatgaaaaacccatttggccactctacatcttgttattggagaattgaaaccatctatattcaaagatattattaaaaggcaagaagttaaaaataaaaaaataaattgcatgtctgttgttatggaattttataactgtacataccttttatttaatccattcacaggtcatattataggatatctttcatttaataagtatactaaatccataccttatactgttgagttttgatagtaccagagggaaaaaagaagaaaagcatggcctctatctttaaggagctatttaacagtcatatgaatcactcgattgagaagatccatatgtgtaatataatgaattccacaaaattgcttattaaaattttttgaaaaagtaggggtgagattgaatatagcaaagctttattgttgatttttgttgttggccaggccaaatttgtgaacattttacatgatcagctatatcgaaatacatttgtatgctctactgaatatagggaacataatttaatatttaatttaaactccaggttaccatcatttacaggcattctgtgcattaaaccgttttgcctcttctttcttcctcagtaacacgtttagggccttttgatgcattggaaagaaaaggcagttgcgagctgctggctctagcaaatcagagctaatcaacctgagaataatgtttgcactttcccgctttcaagtctttgctcaactgctctctacctttgctcccacaggttagtcctttcccccaatctaaaatctctctgactagccctgaacttactttttatagctctcactgtctaccatctccttcatcttgaatatacc

SEQ ID NO: 4 - DNA, 552 bp, Homo sapien
ggagcacggctcctatcacacaataatgtgttattttgttgaattttggcatccttctagcttgtttggtcagaagccaaaaaattagagtgtgtcggtccaccagtttctcagcagagaagctctcttctcacccagcgagtgtgctgtacccttggcctctggccaagaagggaaatccattttacataaagaatgcacaaagctcaagtgctcagagactttttacctactaaaataactttatggacaaatgccagtctgctagacacattcagcaagaacatttggcatgcaaaacaaggtaaagtactctgtggaggtagcaagttttttagaaacaaggaaatggctgtgcgtgccctcgtggcatgtcacgtggcttggcactgccggctgattggctgcggccgagtaaatacagccgccatgtaaggagcggaacgtcgcccttcactggctccttaaaatggcggcctgaacccacaccaggagaagcaagccgagtcccattctcagtttcccctctgaagttttttgttttttgttttt

SEQ ID NO: 5 - DNA, 596 bp, Homo sapien
taaaaggggccagtatgaagttcctctgagttcctgctctcttggagcacggctcctatcacacaataatgtgttattttgttgaattttggcatccttctagcttgtttggtcagaagccaaaaaattagagtgtgtcggtccaccagtttctcagcagagaagctctcttctcacccagcgagtgtgctgtacccttggcctctggccaagaagggaaatccattttacataaagaatgcacaaagctcaagtgctcagagactttttacctactaaaataactttatggacaaatgccagtctgctagacacattcagcaagaacatttggcatgcaaaacaaggtaaagtactctgtggaggtagcaagttttttagaaacaaggaaatggctgtgcgtgccctcgtggcatgtcacgtggcttggcactgccggctgattggctgcggccgagtaaatacagccgccatgtaaggagcggaacgtcgcccttcactggctccttaaaatggcggcctgaacccacaccaggagaagcaagccgagtcccattctcagtttcccctctgaagttttttgttttttgttttgt

SEQ ID NO: 6 - DNA, 983 bp, Homo sapien
caaccctacttattagtgatcaattaatcgtcttgcaagttccatatgccacaatggataaagccaagccaatttatatgttcatgtataatagtcattcctcctgtttatctgtcttgaagatgataacatgattcagagaaatctctgttggagaaactgttggtccctctttgcgtttcataagagatttccaaacaagtgtgacatgtggcatcctaggctgttaccaagtctcaaccttaggctgcgtgcactagttttgtacatcttaattttctaaattttcatttaaatgtttctttttttcttgctgtcttcactgagattgctattcagctcttttctgcctgtgtccatgatttctgtctccccacaaatgtgtacacgcccatttaaacatgcagagagcttcacgtaatgaaaatgactgtgcagtatatgtctatagggttaggtaaattatttattaatgggcatcattctgatgacgctgctccacatttatctttctcccttagttttaagcatagagttggaaagggccatagatatgatctggtcaacctcatcgatagcaggaattatcctgagaacatgctgaaagataggctgaagcctttgcctcaacatttcttctaattgtccctaatgcagcctgtcccattgtttgtcatttcgaattcacagaaagttctgccttatacagagtgaaccaaagctgatctccctgtagctcccagcagtggtccttactctgcttctggagacaagtccatccctctcccatggggggccattcaggctattgaaggcaactcttatatttccccaccctcacccgcagtttccccattttcagctatttaattatattgcccttagtgcccttcattgaggagttgtcttgctaagaccaggtagcaaaaataaggagcttatcagatgaccaccagagatagaaagcaatgaatgggaatctt

SEQ ID NO: 7 - DNA, 1024 bp, Homo sapien
caaaccctacttattagtgatcaattaatcgtctttgcaatgttccatatgccacaatggataaagccaagccaatttatatgttcatgtataatagtcattcctcctgtttatctgtcttgaagatgataacatgattcagagaaatctctgttggagaaactgttggtccctctttgcgtttcataagagatttccaaacaagtgtgacatgtggcatcctaggctgttaccaagtctcaaccttaggctgcgtgcactagttttgtacatcttaattttctaaattttcatttaaatgtttctttttttcttgctgtcttcactgagattgctattcagctcttttctgcctgtgtccatgatttctgtctccccacaaatgtgtacacgcccatttaaacatgcagagagcttcacgtaatgaaaatgactgtgcagtatatgtctatagggttaggtaaattatttattaatgggcatcattctgatgacgctgctccacatttatctttctcccttagttttaagcatagagttggaaagggccatagatatgatctggtcaacctcatcgatagcaggaattatcctgagaacatgctgaaagataggctgaagcctttgcctcaacatttcttctaattgtccctaatgcagcctgtcccattgtttgtcatttcgaattcacagaaagttctgccttatacagagtgaaccaaagctgatctccctgtagctcccagcagtggtccttactctgcttctggagacaagtccatccctctcccatggggggccattcaggctattgaaggcaactcttatatttccccaccctcacccgcagtttccccattttcagctatttaattatattgcccttagtgcccttcattgaggagttgtcttgctaagaccaggtagcaaaaataaggagcttatcagatgaccaccagagatagaaagcaatgaatgggaatcttcatgtcatttatgaatatcgcattcgtcttagatccac

SEQ ID NO: 8 - DNA, 699 bp, Homo sapien
ttcccccagacccctatcctgctgctgatgatccccagggcagcaagaaggacggggtcagccaggcaaggcaggcgcagcctctgtgggccagctttgcccctagcaaagctcctttctcctccccatcctcccttttctctctcctcatcctgaagggacagagccgtgtgggggaattcagccacctcctgagcctttcattggcgactggaaaaccacctagaaagtatagcaaatcatttcaagcaaggctcgaaataagtagaagaaaccaggacagaaaaataactaagatttgccgagacttaaattttaattgtctggcagtgaagacttaggaaactaaagcaaaagaagcagcacaatgagagcatctgcggcgagagtaacagcaagggttgcggtcccgtcactgcagagaactcctgtaagaaatggcagcagaaggaaaagggaaatgcctagtcctagtaatgagggcacttccagttaaatgacagggtgtgacttcatacctgctgaggcagagaagcagaattgaatgacgagactcagtcttggtgagcacgtgaggattcctggggccacgttagtgcaccagttcttttggaagatacttgtaagtttacatcagaagctgcgaaattacagattcttctgattaagtaattcttgtgggaggctaagcattaacta

SEQ ID NO: 9 - DNA, 1883 bp, Homo sapien
ttcccccagacccctatcctgctgctgatgatccccagggcagcaagaaggacggggtcagccaggcaaggcaggcgcagcctctgtgggccagctttgcccctagcaaagctcctttctcctccccatcctcccttttctctctcctcatcctgaagggacagagccgtgtgggggaattcagccacctcctgagcctttcattggcgactggaaaaccacctagaaagtatagcaaatcatttcaagcaaggctcgaaataagtagaagaaaccaggacagaaaaataactaagatttgccgagacttaaattttaattgtctggcagtgaagacttaggaaactaaagcaaaagaagcagcacaatgagagcatctgcggcgagagtaacagcaagggttgcggtcccgtcactgcagagaactcctgtaagaaatggcagcagaaggaaaagggaaatgcctagtcctagtaatgagggcacttccagttaaatgacagggtgtgacttcatacctgctgaggcagagaagcagaattgaatgacgagactcagtcttggtgagcacgtgaggattcctggggccacgttagtggcaccagttcttttggaagatacttgtaagtttacatcagaagctgcgaaattacagattcttctgattaagtaattcttgtgggaggctaagcattaactaaattacgaaaacctcggttagccaagtcatcgcagatgggtccttctatctgcctgctgtgtgcctgcacgtttcctttccagagaagccccggagaggggactttggttggtccccactccagagctctgaccacaaagccgagctctctgtcctggctgccctctccctcctcgtagtttttgtgctggtgcagagggggtgctcccctgtgtccaaggctgccctggcctggggctgctgggcgtctactgctaccgggcggccatcgggagtgtccggttcccgtggcggccggacagcaaggacatttccaagggtattattgaagctcgttttgtttatgtctttgtccttggcattctgttcacgggcaccaaagacttacttaaatctcaagtcattgctgcagacttcaaactcaagactgtaggtttatgggagatatatagtggattagttcttctggcagccttgctctttagaccacataatcttccggtcttagcatttagcctcttgattcagactctaatgactaaattcatctggaagcccctgagacacgatgcagctgagattactgtgatgcattattggtttggtcaagcattcttctattttcagggcaactccaacaacattgccaccgtggacatctccgcaggcttcgtgggcttagacacctacgtggaaatcccagccgtgctcctgacagcgtttgggacgtacgcagggcctgtgctgtgggccagccacttagtgcacttcctgagctcagaaacacgcagtggttcagcactgagtcatgcttgcttctgctacgcactgatttgttctattccagttttcacgtacatcgttttggtgacatctctgcgttatcatttatttatatggagtgtattttctccaaaacttctctacgagggaatgcacctgctcattacagctgctgtctgtgtattcttcacggcaatggatcaaaccagactcacacagtcttagactaagctgaacactggaaaaataatacatgcttaaagtctgctgttattctaaaatgaaagatatgaattcaacaaagttgatggataactttctttgactgctctacctgaatttagactaagcagtaaatagtttaataaaagatcactttaatatacaaaaaaaaaaaaaa

SEQ ID NO: 10 - DNA, 1388 bp, Homo sapien
cgcagtgcctgtgacgcttgacacgcccactttggggcagtctgtggacagacccccgtaatttacagtcaccgctgagcttgtcatcacagcagaaagctgaggctctgcgggcggaagccaccaacagaccagcttgggagacacccactgtggcggcgctgtgtggagacgtccttccagacttcgattctgcataaaaacaaacatctgccacgagacccctgctcggcgtccgcctgtctcagcagctgccctgggacgtctttctctgacttggttttgaggccagccgcgtgctcacactggccttacagaaacaggagacgccgtcctcggccgtctggggtgggctgtcagcacgtcgtgtggtcaggtgtcaggacaagcgggcgtgagcgcgtggaggtgcatctgcctctgccctggagaacggatgtgctacagctgtgcgcggcgtgatcaagcacctgttgggtggacggcacacctcccagtggccagctggagacggagggctggaagtacttgcccggctcctctctctgtaggtttggtcttcggccttgcagctgccctggtgcttgcagattgcggtttgatggaccaggcacttttcatctcttacacagccaggcacgtttgtgtttgggagggaaaaagacaaatattaagtgaggtgaaagcattttgatcaactggagagtatcatgatatttttcctagtcaagaagcatttctccttcattttatagggttttcttcttcccttttaaaagtttaaagcatcaagttttactcatggtttctattttgtttcagtagagtaggaaaactataaccaggtctaaattgtagacagagaaaatatgtttccaaaaggtcaaaaacgtggccttgagtggttggcgaccctctgttccaggggctggcaccccgggctgcctgctcccctgcagcgcaaatggctctttgctaaagtggtgggaacagcaagccgccatcttctagtggttcagcactgagtcatgcttgcttctgctacgcactgatttgttctattccagttttcacgtacatcgttttggtgacatctctgcgttatcatttatttatatggagtgtattttctccaaaacttctctacgagggaatgcacctgctcattacagctgctgtctgtgtattcttcacggcaatggatcaaaccagactcacacagtcttagactaagctgaacactggaaaaataatacatgcttaaagtctgctgttattctaaaatgaaagatatgaattcaacaaagttgatggataactttctttgactgctctacctgaatttagactaagcagtaaatagtttaataaaagatcactttaatata

SEQ ID NO: 11 - DNA, 4939 bp, Homo sapien
ttcccccagacccctatcctgctgctgatgatccccagggcagcaagaaggacggggtcagccaggcaaggcaggcgcagcctctgtgggccagctttgcccttagcaaagctcctttctcctccccatcctcccttttctctctcctcatcctgaagggacagagccgtgtgggggaattcagccacctcctgagcctttcattggcgactggaaaaccacctagaaagtatagcaaatcatttcaagcaaggctcgaaataagtagaagaaaccaggacagaaaaataactaagatttgccgagacttaaattttaattgtctggcagtgaagacttaggaaactaaagcaaaagaagcagcacaatgagagcatctgcggcgagagtaacagcaagggttgcggtcccgtcactgcagagaactcctgtaagaaatggcagcagaaggaaaagggaaatgcctagtcctagtaatgagggcacttccagttaaatgacagggtgtgacttcatacctgctgaggcagagaagcagaattgaatgacgagactcagtcttggtgagcacgtgaggattcctggggccacgttagtggcacagttcttttggaagatacttgtaagtttacatcagaagctgcgaaattacagattcttctgattaagtaattcttgtgggaggctaagcattaactaaattacgaaaacctcggttagccaagtcatcgcagatgggtccktctatctgcctgctgtgtgcctgcacgtttcctttccagagaagccccggagagggactttggttggtccccactccagagctctgaccacaaagccgagctctctgtcctggctgccctctccctcctcgtagtttttgtgctggtgcagagggggtgctcccctgtgtccaaggctgccctggcgctggggctgctgggcgtctactgctaccgggcggccatcgggagtgtccggttcccgtggcggccggacagcaaggacatttccaagggtattattgaagctcgttttgtttatgtctttgtccttggcattctgttcacgggcaccaaagacttacttaaatctcaagtcattgctgcagacttcaaactcaagactgtaggtttatgggagatatatagtggattagttcttctggcagccttgctctttagaccacataatcttccggtcttagcatttagcctcttgattcagactctaatgactaaattcatctggaagcccctgagacacgatgcagctgagattactgtgatgcattattggtttggtcaagcattcttctattttcaggtaggttttcattattatcatgggtagtagacttcatgttttacatatttattttaaatttttctttgagaaaatgttcccataagttggaaagtgactgtcagtgtggcatggtgaattacgctgaactctcgtgtattttataagacaaagtacagccggttgtttaagacacgcgtcccaggtgtggatgtgtgggtgcttaagacagcagactgctgctttgctgggccaggcctgggtttatttattacaagcagttcaggaagcacagacatcacgttgttcacttgcttcactgatgaatgtaataattgttctcgttcatgccctttgcccctggtgtcggggctgtccacactggggaccattggtgcccccatgattattagctccctgaagcctggtgggtcgtcagggcttctgtccggtgtttaaagacccatcccagacaagcccaaaccacctcagtttgaagagacatagagggacaggcagacggggcctcagagggatccagcctcatccagcctcccggcaacctcaggagagcaggccagatggggcctcagagggatccagcctcatccagcctcccggcaacctcaggagagcaggcacagccctgctggttcccttccagtgccgactcccaggctgagtcgctttgcagcagctgaacgtcgtggttgcattttggtctctaccgtgaggtctgtattttcttggtgtgcaccggtgtctgcctgtccgctgtctcgtacccaggaggcatgtgcagttctttgtgtccctacagggcctctcttccatcctcttctcctttcctggtgctcccagcctttcccatggaacagcccacagttgcaggattttctgtctttatgtctgtccccctgatcctgaagcccaaaggtggtaggcgtgaagttacagaagtctgtgtcttcaggtacaatgagtaggtggccaatggccagcttcttagccccgtcctggtgcttccccgacccttctgatccgctcaggcccctgtcctcctcgtacacagctgcagctctccctgccatgtccacgcaaggcacaagggtgtccccagcagaactgcaggcctggatgctggtatccagcacgttcaagccaggtggcctccggcaggctcttgccacaccttcgtttccttatctgtaaaccagggatagtggtctcccggcctccccaggacccagccctccctggtctccccacctccccgtggcccctgttttgaggctgagtccgctgcccctcagtgttagatctcctctgagaggaacctgtggctttgctgcccatccctacttcctgccctcgactgggcagttccttaacagatcagggatcaggaacatgactgcccttgctcatctgctggccctccacatttgcccagtccctgggtctctctgcctccgtttcctccctgtttgatgaggataatcacgaagcacatcaggactgttgggttagatgaagtcatgcaggtaaagctgctgtgcagctgcagacatgtcagcatggctggcagtctctgtgcttggctgagcctgctcagagccacagtgacctcctaggtgtcctcctcccctgctcccatcgtggcatctgggactctgtccccctgccaccctccagggtctcctactgcttctgcctgtttgctctctcctcagtctccctgcagaagagcttccaagtggaggagacacatgactggggtggcaccgtccaagagaggcagtagctgcgagtccagtgggtctcagggcaagccaagtcaaagggctggggcctaagacaacagggataggagtcaatgcacatctgtgagataatggggaagcagcatcaacatgacttggggaccccctgggcccacagctctctgcatggaaagggaggaaggagccaagctggtgagcacccagccagtgttttgtggacatgaacagttctggttctggagagggatcttcgttgagcttgatagagacatgtgctgtcggactgtagatgtcatgagtttctgaggaaaggtcagcatgacaggcaagtgacagacatcagagtcagtaaagatggagcgtggggaggcggggcctgggagcagagaggaggggcctaggaatggagaggtggggcctaggagtggaagggtgtggtcttggagtggagaggcggggcctgggagcagagaggaggggcctaggaatggagaggtagggcctaggagtggaaaggtgtggtcttggagtggagaggcggggcctgcgcagagaggcagggtctctcagaagacccctttttgggatccagaatcactaggagcagggtaagctgtgtggcatcagcgcttgcatcctgcagggagttacctaccagggctgggccgggactggccagaaccttgacagatgaagtttgaccagaccaagtgagtcctcatggtctgatacgtaagccagatgtgagttaccaatttgcaccaggggctgtgctcccccagtggctggcctgccctccaccatataacccactggcagcacctcaccgtagatgggacctggctgggtgcccgttctagtcttcagcccagctccccgcttggctgggcccagcagctggcctctcagggccctatgcgcccctcggatgggggtccttgaggggagcttcatgtgcttgtcttaagtcgatgggtctggacaagggtcttagatgtggcacagtcagccagccggtctgtgtgtgcgtccctcttcagagggggccccagcttctgcacggtccgctcacgtgcccttccgcagcctgggcactgcaggcagggggagggggtgccacctaggcaaggccagctcggcagtctgaaggaacggctgggcagccacctctgaccacacgtgtgtccgtgccggcgtggttatctgggctgcctacacagttcacgctaacatcgtggctcacgctaacatcgtggctgttgatgccacgtgttgtgaggcctttgtcagctcttctcctgtattccagggcaactccaacaacattgccaccgtggacatctccgcaggcttcgtgggcttagacacctacgtggaaatcccagccgtgctcctgacagcgtttgggacgtacgcagggcctgtgctgtgggccagccacttagtgcacttcctgagctcagaaacacgcagtggttcagcactgagtcatgcttgcttctgctacgcactgatttgttctattccagttttcacgtacatcgttttggtgacatctctgcgttatcatttatttatatggagtgtattttctccaaaacttctctacgagggaatgcacctgctcattacagctgctgtctgtgtattcttcacggcaatggatcaaaccagactcacacagtcttagactaagctgaacactggaaaaataatacatgcttaaagtctgctgttattctaaaatgaaagatatgaattcaacaaagttgatggataactttctttgactgctctacctgaatttagactaagcagtaaatagtttaataaaagatcactttaatata

SEQ ID NO: 12 - DNA, 1360 bp, Homo sapien
ttcccccagacccctatcctgctgctgatgatccccagggcagcaagaaggacggggtcagccaggcaaggcaggcgcagcctctgtgggccagctttgcccttagcaaagctcctttctcctccccatcctcccttttctctctcctcatcctgaagggacagagccgtgtgggggaattcagccacctcctgagcctttcattggcgactggaaaaccacctagaaagtatagcaaatcatttcaagcaaggctcgaaataagtagaagaaaccaggacagaaaaataactaagatttgccgagacttaaattttaattgtctggcagtgaagacttaggaaactaaagcaaaagaagcagcacaatgagagcatctgcggcgagagtaacagcaagggttgcggtcccgtcactgcagagaactcctgtaagaaatggcagcagaaggaaaagggaaatgcctagtcctagtaatgagggcacttccagttaaatgacagggtgtgacttcatacctgctgaggcagagaagcagaattgaatgacgagactcagtcttggtgagcacgtgaggattcctggggccacgttagtggcacagttcttttggaagatacttgctctgaccacaaagccgagctctctgtcctggctgccctctccctcctcgtagtttttgtgctggtgcagagggggtgctcccctgtgtccaaggctgccctggcgctggggctgctgggcgtctactgctaccgggcggccatcgggagtgtccggttcccgtggcggccggacagcaaggacatttccaagcagggcaactccaacaacattgccaccgtggacatctccgcaggcttcgtgggcttagacacctacgtggaaatcccagccgtgctcctgacagcgtttgggacgtacgcagggcctgtgctgtgggccagccacttagtgcacttcctgagctcagaaacacgcagtggttcagcactgagtcatgcttgcttctgctacgcactgatttgttctattccagttttcacgtacatcgttttggtgacatctctgcgttatcatttatttatatggagtgtattttctccaaaacttctctacgagggaatgcacctgctcattacagctgctgtctgtgtattcttcacggcaatggatcaaaccagactcacacagtcttagactaagctgaacactggaaaaataatacatgcttaaagtctgctgttattctaaaatgaaagatatgaattcaacaaagttgatggataactttctttgactgctctacctgaatttagactaagcagtaaatagtttaataaaagatcactttaatata

SEQ ID NO: 13 - DNA, 3310 bp, Homo sapien
gatagatcttcattaagcgtcagttgtgaaaagtgaaggctttgccgtgtgccatgcataaccgaatactttgagattatgtatataaatgtatgttcacggtgtgtgtgcgcgcctgtaacctttctgtcttcttaatagatcctgggtttgagcagtttaaaatgtcagaaagattgcatgggaactggatcagactgtacttggaggaaaagcattcagaagtcctattcaacctgggctccaaggttctcaggcagtacctggatgctctgaagacgctgagcttgtccctgagtgcacaagtggcccagttctcaccctgctcctgctcagcgtcccacaggcactgcgcagaaaggctgagctggaagtcccactgtcatctcctgggttttctctgctcttttatttggtgatcctggttctttcggccgttcacgtcattgtgtgcacctcagctgaaagttcgtgctacttctgtggcctctcgtggctggcggcaggtggggtgatggtgctggcctcggcgctgctgtgtgtgattgtgtctgttctgaccaacgtgctcgtgggtggaaacaccccaaggaaggtacgtacggctggttcctgggagtgtgacgtagtccttctgctcaggttgttcttgttatttcaggctgcctttcgtttaccagactctggttgaacacctggtgtgtgccacgtgctggcagtgccctggacagggggcctcagggaaggacgtggagcagccttatcccaggcctctgggtgtcccgacacaggtgttcacatctgtgctgtcaggtcagatgcctcagttcttggaaagctaggttcctgcgactgttaccaaggtgattgtaaagagctggcggtcacagaggaacaagcccccccgctgagggggtgtgtgaatcggacagcctcccagcagaggtgtgggagctgcagctgagggaagaagagacaatcggcctggacactcaggagggtcaaaaggagacttggtcgcaccactcatcctgccacccccagaatgcatcctgcctcatcaggtccagatttctttccaaggcggacgttttctgttggaattcttagtccttggcctcggacaccttcattcgttagctggggagtggtggtgaggcagtgaggaagaggcggatggtcacactcagatccacagagcccaggatcaagggacccactgcagtggcagcaggactgttgggcccccaccccaaccctgcgcagccctcatcccctcttggcttgagccgtcagaggccctgtgctgagtgtctgaccgagacactcacagctttgtcatcagggcacaggcttcctcggagccaggatgatctgtgccacgcttgcacctcgggcccatctgggctcatgctctctctcctgctattgaattagtacctagctgcacgcagtatgtagttaccaaaagaataaacggcaataattgagtcctcatctttacttttgactgctttaagttagtatatttaagagacagtactgtgatgccaactttgtcatttcaacagaattaaccattttagtggaaacgttctggatttctagaatattcctggagaaatttgaggtctggtttggtgggatgtattgttgaggttctttggtttcaagaagcaggcactggcgacgtgcatctgaagacctaagctcttccagagcctggaagcgggagcgtggagggccgggtccaggagcctttgggcaagctctctgggctgcaccactgcccagagggttctgaccattttcagtctttgtcactcaccttgggacttggagtccagtgtgagaacagctggctggccgtgcagtgtccggctcccctgcctgggctgagggcgtctccactcctgcaggctgcgtcccaagaggaaggttcctgccgttggagcagaagggggctgttccagagtaggggcccaggtgctgggtgtgaggaacaatggtgtgtgtccagggcattctctgctgtgagcaaggacttgacatgcagcaagatgtgtgtcgttatcagaccgtctcttacaaagtgcactttccttttcacagaaccccatgcatcccagctcaaggtggtcagagctagaccttcttattctgttggggacggcgggccacgtcttgagcctgggcgccagcagcttcgtggaggaggagcaccagacctggtacttccttgtgaacaccctgtgtctagctctgagccaagaaacctacagaaactactttctgggagatgacggtgagcctccgtgtggcctctgtgtggaacaagggcatgacggggccacagcagcgtggcaggacgggcctggctgtgatgtcctggagcgagacaaaggccacggaagcccctctacctccgaagtgctcagaggccgcgagaagtggatggtgctggccagtccgtggctaatactggcctgctgccggctgctgcgctccctaaaccagacaggtgtgcagtgggctcaccggcctgacctcggccactggctcaccagccacagcgagaatgcgctcattactgcgaagatggcaccaagccattcgtgaggaatctgcccccatgacccagacgtctcccacaaggctcacttccaacactggaggttcagtgtcttttttttttttctgaaacggagtttcactctgtcacccatgctggagtgcaggggcacgatctgggcttacggcaatcaagagattctccggtctcagccccctgagtagctgggattacaggcgcccggtacatgcctgggctaattcgggcggttcaggggagatgggcgggtgacccatgtttggctggcggtgggcctttaaatcctgaactctaggggagtcccccactcgggctccccaaggggagaaacacaggggagacacacggtgcacccgaaggtccccgcacaatgggaacggcggggggcaccacatctcggcacgtgggttccccaaaccatatgcgtggtgtagtgccccagcgggagacacaaagcagggctgcacaaaagcaagaggccacccactgtagcgacgatcgccgcataacaacaatacatccaccacacccatactccacctaaaaaacagagcgaggagtgacacaacaacgtggaggggatgagccaaagactaaaataaccagactcgaatagacgaaacaatcgcaactaggagacaagaacgacaggtccacagctatagctactactcgtgtactcgcaccgctcctcgagat

SEQ ID NO: 14 - DNA, 848 bp, Homo sapien
gagacggatcgtttggctcatgttagttgtagaaggtctaattcaagagtgagtaccatcttacactttctagaagtctgttacttaaaatgttttctttcttctaggtgatatccgacatccaaagcacgtccaacagacggatgtggctgcgacactggcgatagcacttggcttaccgattccaaaagacagtgtagggagcctcctattcccagttgtggaaggaagaccaatgagagagcagttgagatttttacatttgaatacagtgcagcttagtaaactgttgcaagagaatgtgccgtcatatgaaaaaggtcagtcaactcaccgtttcgagctctgtcagagctgtgtgtttccactgagctcgggtttctccgatgtgtttctgtggtatgcagtttgtcacaggagtattttttcatcactactctttgatgatacagattgtgtttctgttttcttagaactttgaactatcaccattggcagcaccctcagatgcagttatctaaagttctttcataaatttattcattcaacaactatttaccaggatcttgttatgaatgagaggctgttaacaggcactggagacagagcaggtacgaggctctgccctcatggaaccttccagagggaggagagaaaaggaagtgatcgatggccgatggtgacgagtaccttaggaaaagaataaacagggctgggtgcggtggctcacgcctgtaatcccagcactttgggaggccaaggcaggcggatcatgaagtcaggaattgaagaccagcctgactaacacagtgaaaccccgtctctactaaaaatacaaaaattagcca

SEQ ID NO: 15 - DNA, 581 bp, Homo sapien
gatgcattattgtattgggcaagcattgttgtatcttcaggtcaactgcagcatcatcgacaccgaggacattatcgtaggcttggtgggctaagaccttacagggaaactctcaacgagctccatgaagcgagagggacgtactcaggagctgtgctgtgtgctcagtccttaacgcactatctgagctcagagactctctgggtgtcagcaatgctacatgacagcttctgatacccactgcatatgactattacagattacgcgtgcatcgaaccggtgacagctggtgtgaagccaaccatatatactgcgtgacttttctccaaaacttctctacgagggaatgcacctgctcattacagctgctgtctgtgtattcttcacggcaatggatcaaaccagactcacacagtcttagactaagctgaacactggaaaaataatacatgcttaaagtctgctgttattctaaaatgaaagatatgaattcaacaaagttgatggataactttctttgactgctctacctgaatttagactaagcagtaaatagtttaataaaagatcactttaatata

SEQ ID NO: 16 - DNA, 792 bp, Homo sapien
  misc_feature (9)..(9)
  misc_feature (9)..(9): n=a,c,g or t
gatccccgngctgcaggattcggcacgagctgggcactgcaggcagggggagggggtgccacctaggcaaggccagctcggcagtctgaaggaacggctgggcagccacctctgaccacacgtgtgtccgtgccggcgtggttatctgggctgcctacacagttcacgctaacatcgtggctcacgctaacatcgtggctgttgatgccacgtgttgtgaggcctttgtcagctcttctcctgtattccagggcaactccaacaacattgccaccgtggacatctccgcaggcttcgtgggcttagacacctacgtggaaatcccagccgtgctcctgacagcgtttgggacgtacgcagggcctgtgctgtgggccagccacttagtgcacttcctgagctcagaaacacgcagtggttcagcactgagtcatgcttgcttctgctacgcactgatttgttctattccagttttcacgtacatcgttttggtgacatctctgcgttatcatttatttatatggagtgtattttctccaaaacttctctacgagggaatgcacctgctcattacagctgctgtctgtgtattcttcacggcaatggatcaaaccagactcacacagtcttagactaagctgaacactggaaaaataatacatgcttaaagtctgctgttattctaaaatgaaagatatgaattcaacaaagttgatggataactttctttgactgctctacctgaatttagactaagcagtaaatagtttaataaaagatcactttaatata

SEQ ID NO: 17 - DNA, 1228 bp, Homo sapien
tctggaaaggaggggctcttaaaggagcctctctgggtgggctgggaaggggattccctactccacggagaggtgcagctggtttgccttgcactgcgtgtcccagggacaacccactcaaactgggtgtcctagggacaacccacctccctctcctgccaaaaggttactgattgggctccccataaccccagctctgccaggacccttttatcctttttggctcccagaggcatagagctgagattccagggttctaggggttcctggaagtttggctccaactgttgtattctcttccctttcccctgctgctcagtttgtgcccataacctcctcctgggtagtcccctgaggttggcaggacttggcccttctggggcccctaaagcctgctcaggccctcctgctgctgaaccttggcctgggcactgctttcctgcatcctggaaaaccccgactccctggcccaggcccacacctgctgtgtggggctgcccacgtggccactgagcccccataggctgccatcaaggccggtcccagcaatttcagccaggctgccccagggcccagacgtctgtatacacagcaggcacctgtgtcagctcagtgtcgcttctgctcaatgtctacctctcgcggctcccatgcagccagtgacgctgctggtgggggcggctggcaccgccgttgtgaattgcctggcaaattgggtgccctcctggggctggaggggtctgggctcctaacccccatccctgctctccccactagaaatgtgtcttcagtctgccagctcttctgctctacttccagtgctgcatcctgcactcaagcccagggctgctggcgagtctatggggaggagtgtggatcaggctcagcctcagcctcagcctcagcctcctctatggtcctgtctcctggcggttcacaggtgcccatcccccctttaacatttcacagttcttggctttccaaaggcaccagctcatatggcatagccaccccaaccctaatccttcccccaaatatcctgatttaaacttgggcagacttagtctgattcttgaaaactctaccatctcctttttgcagaaggcactggttacactaaagtgataaaataattagtatggggtactttgctcccagttacattccctcttccctgagaaccccaggctaggcgagagagggagagggagagagaaagagagagagg

SEQ ID NO: 18 - DNA, 2120 bp, Homo sapien
  misc_feature (336)..(392): n=a,c,g or t
gtgccctgaggggtgggctgtgctcagagcagggagcggggggcccaatcaggctgcctgcggggacgggagggggctgccctctccccgacacaggcgttttcctgctttttccctcccgtgtctgtccagcagtgtccgaccagagcggggagggatcctgcccgagcccggggggctccctgagctgcgacggggtgaggtccggggatctcggtgcagccactgctgcctcccacgggcctgcgaccgcaagcccaagtcagggttcatgtttgtgtcatcctgggggcaggcttgcccggggctgaagcgtttaagctctggctcagctgnnnnnnnnnnnnnnnnnnnnnnnnnnnnnnnnnnnnnnnnnnnnnnnnnnnnnnnnntgttattggaggggtccccctagctgagattggtgtgagtctttgactcccaagatgtcctgcagtttgggccattgaggctcttcaggcctaagggtccctccgagtgtcctgtgacccacaactttcacacagcctgggagagggggtctgggtgggctggaaaggaggggctcttaaaggagcctctctgggtgggctgggaaggggattccctactccacggagaggtgcagctggtttgccttgcactgcgtgtcccagggacaacccactcaaactgggtgtcctagggacaacccacctccctctcctgccaaaaggttactgattgggctccccataaccccagctctgccaggacccttttatcctttttggctcccagaggcatagagctgagattccagggttctaggggttcctggaagtttggctccaactgttgtattctcttccctttcccctgctgctcagtttgtgcccataacctcctcctgggtagtcccctgaggttggcaggacttggcccttctggggcccctaaagcctgctcaggccctcctgctgctgaaccttggcctgggcactgctttcctgcatcctggaaaaccccgactccctggcccaggcccacacctgctgtgtggggctgcccacgtggccactgagcccccataggctgccatcaaggccggtcccagcaatttcagccaggctgccccagggcccagacgtctgtatacacagcaggcacctgtgtcagctcagtgtcgcttctgctcaatgtctacctctcgcggctcccatgcagccagtgacgctgctggtgggggcggctggcaccgccgttgtgaattgcctggcaaattgggtgccctcctggggctggaggggtctgggctcctaacccccatccctgctctccccactagaaatgtgtcttcagtctgccagctcttctgctctacttccagtgctgcatcctgcactcaagcccagggctgctggcgagtctatggggaggagtgtggatcaggctcagcctcagcctcagcctcagcctcctctatggtcctgtctcctggcggttcacaggtgcccatcccccctttaacatttcacagttcttggctttccaaaggcaccagctcatatggcatagccaccccaaccctaatccttcccccaaatatcctgatttaaacttgggcagacttagtctgattcttgaaaactctaccatctcctttttgcagaaggcactggttacactaaagtgataaaataattagtatggggtactttgctcccagttacattccctcttccctggcagccgcaggcgatgagaccagaggcggagatggcggacggagacgatacgcacgagagagtgctagcaggagagagaacgagagcataggcgagtagcgacgaggatagaaagaacctcgcgacagaatagggagccagaacgaccatggcaaagagccgaacgcgaccctaaatccttcccaccagaaagtaaatccggagcataggagagcgttgccgcgaggagccacagacactggactactgtggaacaacgcgacagtacccaatgcctccataagcgaggcaggcaccaaagcgagacaggccacagaccctacacagtgtagtgacaagcacctcagccttaggcgacccacaagagcgcgccacgcatactctcgcccagaa

SEQ ID NO: 19 - DNA, 1226 bp, Homo sapien
gctggaaaggaggggctcttaaaggagcctctctgggtgggctgggaagggatccctactccacggagaggtgcagctggtttgccttgcactgcgtgtcccagggacaacccactcaaactgggtgtcctagggacaacccacctccctctcctgccaaaaggttactgattgggctccccataaccccagctctgccaggacccttttatcctttttggctcccagaggcatagagctgagattccagggttctaggggttcctggaagtttggctccaactgttgtattctcttccctttcccctgctgctcagtttgtgcccataacctcctcctgggtagtcccctgaggttggcaggacttggcccttctggggcccctaaagcctgctcaggccctcctgctgctgaaccttggcctgggcactgctttcctgcatcctggaaaaccccgactccctggcccaggcccacacctgctgtgtggggctgcccacgtggccactgagcccccataggctgccatcaaggccggtcccagcaatttcagccaggctgccccagggcccagacgtctgtatacacagcaggcacctgtgtcagctcagtgtcgcttctgctcaatgtctacctctcgcggctcccatgcagccagtgacgctgctggtgggggcggctggcaccgccgttgtgaattgcctggcaaattgggtgccctcctggggctggaggggtctgggctcctaacccccatccctgctctccccactagaaatgtgtcttcagtctgccagctcttctgctctacttccagtgctgcatcctgcactcaagcccagggctgctggcgagtctatggggaggagtgtggatcaggctcagcctcagcctcagcctcagcctcctctatggtcctgtctcctggcggttcacaggtgcccatcccccctttaacatttcacagttcttggctttccaaaggcaccagctcatatggcatagccaccccaaccctaatccttcccccaaatatcctgatttaaacttgggcagacttagtctgattcttgaaaactctaccatctcctttttgcagaaggcactggttacactaaagtgataaaataattagtatggggtactttgctcccagttacattccctcttccctgagaaccccaggctaggcgagagagggagagggagagagaaagagagagagg

SEQ ID NO: 20 - DNA, 889 bp, Homo sapien
ccctctgctgagtaaccaagcctttaattttgtgtttttatgaaaggaattaaaatacccacgataaatatttaccacaacctgtgtcaaagaaatgggaaattaaacacagattgtacaatgtgagcttgggagttaatggcccagattttactgttaggcagtaagagttggagtaggtagtcttgttatcatgagaagaaccttgaacagatacaactaatttacatattactaaccaaacttaaacattaaactttttctactactttaaattctaacctggaatgtttcagagttcttcattctaatatcaccctgaattccattgaagctggaaatgtcattttccaagcccacctgtcattcatttacccatgcagaaaaaatggtaacttgaagagagtggcatgtgcctgctgccttagaggttatagaatccccacagtcaacaaaaaagcctctagagacatgactgttgccatggaaaccagagaaaatgtgtcttctcatccctcatttgtaaatgagggggtggagcagatcatctgtctctaaggtctttttcagtgctaaaatgtggtgattctttgggaaaaactttttgcatcaagtatgattaaatattctgaaagacgagtgtagcttaaaatttgttttgtttttaaattctgttcatgggtcttcttaaaatggacccttgccgaaaggcggcctgtgacggcctcaggtgggaagatggatgtccttccaagggtgtggctggcagtggggtttgcatgactgcttcttgtctgtgtttcaagtgctctcatctattggtttggtttcctttctttttattatttttctcatggtgccacttttttttttcctccaacggaatcgg

SEQ ID NO: 21 - DNA, 492 bp, Homo sapien
gtgggcctgacatccctatagacatttctgagtacactatgtaggagacttcggtattttatttctcttcctgctccaaccaccaacacacaaaaagtatggtgatcccataagctaaacttgaatagagaaattgccattaaaattacttattttaaaaaattcatccatcaattttttaataattatatcaaagtttcatatagtttcatttcagaagtcagatgaagcaatagaacattttctaagaatttttttttcctaaattataaacatggtcctagatattatggagagatctgagttgtggaaagacagcaatttactcacattcttattaattattttgtagatcacttttatactatctaaagaagggtaggttttaaaaatatttattgataatttctttaaaactctaggagaaattagcattacaaaaacaaaacacatatagggtctcagttaagtcaaagtcagcagatttatgtc

SEQ ID NO: 22 - DNA, 493 bp, Homo sapien
gtgggcctgacatccctatagacatttctgagtacactatgtaggagacttcggtattttatttctcttcctgctccaaccaccaacacacaaaaagtatggtgatcccataagctaaacttgaatagagaaattgccattaaaattacttattttaaaaaattcatccatcaattttttaataattatatcaaagtttcatatagtttcatttcagaagtcagatgaagcaatagaacattttctaagaatttttttttcctaaattataaacatggtcctagatattatggagagatctgagttgtggaaagacagcaatttactcacattcttattaattattttgtagatcacttttatactatctaaagaagggtaggttttaaaaatatttattgataatttctttaaaactctaggagaaattagcattacaaaaacaaaacacatatagggtctcagttaagtcaaagtcagcagatttatgtca

SEQ ID NO: 23 - DNA, 992 bp, Homo sapien
cgcagacccatgaggtaaggaggacttcctggctgtgctcggagggcgcccggacggcagcgcctcctgccccttcgttgccctcctggtgccgggcgcctccgggactcccagggagaaagcgaacccgctggaagccacggccggctgcagagaatgagggcccttgggggtcagcgggactaggaacccctctgctttcggtctttctcggttccctgctcattgggctgctcagctgggaggcgcaccgccagctagagcgcagcccgcacgttgtagtcaagcgacccgacaagcctcccactctccggggctgagcagggatcggtgctggggctccagattaggggccattctcactcagtgaggcgcgcacccttgtttggtgaccaatgcgcgtccccacagaactccaaggcagcaggaaaacgcccggaaagaaggctgcaggatgtgggccccgggagtgctgatgcagccccgggtcttccgatgcctgcgggacacagcagaagggctgcgcaggcgctcagggtctgtttcgctgcgatagcctgagcttcttcgaaagagtttgagcttccaagcgacccttcttgatctattttcttgcactggacaagaactaagacagtggagagggaggcaggacttcaatggcaggagcccctgctctgattcaggaaatctgaggcctgaattacaatatgatgggccgtcagaagtcatgaagaccatgggtgacaacgtcggtcaggccctggcacagtgcctggcacagtgcctggcacagtcatgacagccaatctttagacccctcagggtccatgctagcatctctttgcgttgtgcaagtgtgtgggaggtggagagcgtttttggtgcagtctccctcttagtcttgaactggcccccttcagctctgggctgctgcattatcacccctgccgcttcccactgggctcttgaagcctgctggagagggtcca

SEQ ID NO: 24 - DNA, 3130 bp, Homo sapien
taaagaggtaatccaagtaaaatgaggtccttagagcaggccctgatccaataggactgtccttattagaagaggaaacttggacacagatacacacagagggagcaccgtgtgaagacacagagaggagatggccagctaccagccaagcagagagcccttactgtaaaccaaccctgccgcatcctgatctcagaattttggcttccagaactgtaaggaaacacatttctactgtttaagccacttggctgggagtacttggttatggcagcctgagcagactaaaccagcacctcaaagagttgttatagggtatgcttagtggtaactggttcctaaaggccttgctttctaaggctgactcctcaccctgcaaggatgcattctccccactggcagatatgcaaccaggaacaggcattaacacgctttattcccagagttttaatattttccattgcataaaatatttgttcatgaaaatgacaaaattgctattagattctatcaccacatctctgttgattttactttctgcaaacacatacaagtaatgtaggcatacagttaaaaatgaaaccttatcctgtagttccagctactagggaggctgaagcaagagaatggcatgaacctgggaggcggagcttgtcgtgagcccagatcaggccactacactccagccggggcaacagagcgcaactccgtctcaaaacaaacaaacaaaacaaaacaaaaaaaacttatagacaagtacaaaatgagaagaaaaagtccctttcccttcatgcctctacttcctgctgtattctcaaaggtaagcactgattacagtttacttatggatctttccaggaaaatattttatgcatttatcagaaaatgtaagtatatgcatcctttaaaattctgcataaatcaaactctgcagggtactatcttcccatcctcatttgatattttgtagatcttttcctattggctgtacagatcacctcattctgtctcctgggtcatacaatatagctcacataattctaagtctgaaggttggtccaaatggttccaagaatgcaggtaccaaaaagtagtctcttgaagaggccatcagagacctggctgtttgtatcttcctcctctgccatccacagtgtcatcttcacccaaggtggctggagaagctgttaggaatatgtggttttttaaaaattacattcataggaaaaggggagggaagagaagaagaaaacctctccccctaagctcatggctctttttagtcaggctgagccaactaaagtcatgtacttcccttagataggtaactgttgccaggaaaatgccctgtgtggattggcctggactaagcaggatcctcctctaaagagagagatgagatgaatgcctgacccaagtctgggatcttgggtgggaagcgtgtggatagtaggtcagaggtcagcagtgtctgtggtgtaggatgtaatcccatctccacagagctgcatacaagtgtgtttaagtgtgtgcaagtgattaactttgattagtagtttcaactctttacaatgaacatatttatcttttttaaaaaataaagccattttaaaagatcttgccataaaacaatcattccttaagtcaccacttaggatagacctagaatatttgtcctttctcaagagcaccagagagttttctggtaatccacgcaataaacagttataaaaggtaattgttgagatcaggggaagatggcagataggaggcagtgctaatgtgtagctcccacatggatggacaaaacaccatgtggagactcacactgtgaccctgttgtgctccaagaactatcataggaacgtactgggaaaaccaaaagaattcacggatcctttgaaagaagacgcacaccactgtaaattctgtggaacaggagaaaaactgtcttggaggaaggcatccttctattctactgatcagaaagctggacaaagtcccactgccaggctacacagttggtgccatttgcggaggtgacctttgacctttaacccacgcggccacccgcccgagctcttacccctgctgcccctcgcgcgtcccactccccgtccctgccggatccgcttccctgcgctgggcccagcgcgccgccagggaaggggccggagcctgggagcccgccccgccgtcgcccgtcctccgcccgcaggcccacccgcagcggtcacgtgaaggaccgagcgccgcgcgcccaggcggggcctccggcctgcacgaggagggcagagtccgttgcggctgccgccccgacgcccgcgcatccccgctcgccgcgcccgccgccgcgatgtccggggccggcctagccgcggtggtgagctgcctgcgcccgcagcccggcgaggagccgcagacccatgaggaccttctcctggcagctgcctatgttttggatgcccagtacaacagaaatgttccatttgaaactcacctcaggccatcagacgttactatttttataaccactagacaacgcaggttgccgcatacttctttatttgtgtagacctcgctcttgccctgtttgaagagcctgagttgcttcccctgcctttcttggccacctcaatagcagaagtactctgcctgactgcatactttggcagactggtacattttgcaaaagtcactcctcaaatggttttctggaaggatacaaaagacatctgcaccatggtaaccacagtggcgagtgttcattgtagtacctgtaagagtttatgaccgaaggcaggagccatgaagaaaaaagactcaatagatttgcttttgatgaaacaacaacacttccatacagtgaacgccataagcacaactgcaagcaaaccgcaaactgaagaacaaatagggcaaaatgtggcagtgcagacatttcagcatatcaagagcacttccaaattacaggaaaaaaaagatatctcaatagataattttgctgaagataagtgaaggcaactcataaggaaaaaatatgtaaaatggccgataggaaagatgtttaacgtcactaattaaaaattatagaataaaacgacaataaaataccatgtgtttgcctata

SEQ ID NO: 25 - DNA, 949 bp, Homo sapien
gcttatttacatttcctctgagagcctatatttgaattcaagaaagtggagtgtgtctggacctggtcccactgcaggattctcggtgctcaaagagacattggaggtgtggagacaacactgtttagatgttggctacctctgggagagtgggtctgtggagaggcgaaggggagcttccttttatactcagtgcatacttaacaaaggaaaaagaaaagtatcctctcctcctctgacttggtctcccttactctgtctcaatggggaacaggaccttctcctggcagctgcctatgttttggatgcccagtacaacagaaatgttccatttgaaactcacctcaggccatcagacgttactatttttataaccactagacaacgcaggttgccgcatacttctttatttgtgtagacctcgctcttgccctgtttgaagagcctgagttgcttcccctgcctttcttggccacctcaatagcagaagtactctgcctgactgcatactttggcagactggtacattttgcaaaagtcactcctcaaatggttttctggaaggatacaaaagacatctgcaccatggtaaccacagtggcgagtgttcattgtagtacctgtaagagtttatgaccgaaggcaggagccatgaagaaaaaagactcaatagatttgcttttgatgaaacaacaacacttccatacagtgaacgccataagcacaactgcaagcaaaccgcaaactgaagaacaaatagggcaaaatgtggcagtgcagacatttcagcatatcaagagcacttccaaattacaggaaaaaaaagatatctcaatagataattttgctgaagataagtgaaggcaactcataaggaaaaaatatgtaaaatggccgataggaaagatgtttaacgtcactaattaaaaattatagaataaaacgacaa

SEQ ID NO: 26 - DNA, 801 bp, Homo sapien
agccctggacagaatgcatggagaagctaactgaggattctagaaaaaaaaaaaaaggagcaggaatatttgggaaggaaaccagaattcaaaacactactaagctgttgatatttgggttcttggtctggaccatggtagccgccacccacatagtataccccttgctgcaaggatgggtgatgtatgtctcgctcacctcgtttctcatctccttgatgttcctgttgtcttacttgtttggattttacaaaagatttgaatcctggagagttctggacagcctgtaccacgggaccactggcatcctgtacatgagcgctgccgtcctacaagtacatgccacgattgtttctgagaaactgctggacccaagaatttactacattaattcggcagcctcgttcttcgccttcatcgccacgctgctctacattctcctgccacaaccgcattggaagaaaaggctgccgcaacatctcagcgaggagtgaaggacccatgtcccaggaaccgcgctgcgccacctgcactcacccccctcacattctcttaagcacccggtggccctccgaggcctggcggaatggtggtgcccacggggttgggcaagggctcaccaggacctcaacgggcaaagttgtgcacactaaaatatcaaatcaaggtgcttggttttaaagtaaatgtttttctaaagaaagctgtgttcttctgttgacccagacgaatagggcacagccctgtaactgcacgtgccttctgtcattgggaatgaaataaattattacgagaaaggga

SEQ ID NO: 27 - DNA, 562 bp, Homo sapien
aagattaatattttgtgacacatggaagtgatatgaaatacaaattttgctgtctgcaaataatgttttatgggaacatagccacacttattaatttatgtgttgtctttggctgctttggagctacatcaacagtttagtggttgtgacagagactgtaagacttgcaaagcttcacatgtttactttaacagaaagagttcactaacccctagctttagagaacaacagccttttattatctcccatgactctgtgggacattggctcaggtggtgtggctggggtggtagatgtctggaagctcttagatctctggaggctggaacatcaaggtagctctctcacgtggctggcaggagctgctggctgtagctgtggccccggccctcttctatgtagctgctccacgtggcttaggcttttcccagtgggtggctgggtccaggaaggagcatcccagtgtgctgcaccatcaaacctctgcttgcatcatacttgctgatgtcctgttgtcaatcacatgccaaaacccaggcagccatacctcatcctggatgtt

SEQ ID NO: 28 - DNA, 4611 bp, Homo sapien
taaagaggtaatccaagtaaaatgaggtccttagagcaggccctgatccaataggactgtccttattagaagaggaaacttggacacagatacacacagagggagcaccgtgtgaagacacagagaggagatggccagctaccagccaagcagagagcccttactgtaaaccaaccctgccgcatcctgatctcagaattttggcttccagaactgtaaggaaacacatttctactgtttaagccacttggctgggagtacttggttatggcagcctgagcagactaaaccagcacctcaaagagttgttatagggtatgcttagtggtaactggttcctaaaggccttgctttctaaggctgactcctcaccctgcaaggatgcattctccccactggcagatatgcaaccaggaacaggcattaacacgctttattcccagagttttaatattttccattgcataaaatatttgttcatgaaaatgacaaaattgctattagattctatcaccacatctctgttgattttactttctgcaaacacatacaagtaatgtaggcatacagttaaaaatgaaaccttatcctgtagttccagctactagggaggctgaagcaagagaatggcatgaacctgggaggcggagcttgtcgtgagcccagatcaggccactacactccagccggggcaacagagcgcaactccgtctcaaaacaaacaaacaaaacaaaacaaaaaaaacttatagacaagtacaaaatgagaagaaaaagtccctttcccttcatgcctctacttcctgctgtattctcaaaggtaagcactgattacagtttacttatggatctttccaggaaaatattttatgcatttatcagaaaatgtaagtatatgcatcctttaaaattctgcataaatcaaactctgcagggtactatcttcccatcctcatttgatattttgtagatcttttcctattggctgtacagatcacctcattctgtctcctgggtcatacaatatagctcacataattctaagtctgaaggttggtccaaatggttccaagaatgcaggtaccaaaaagtagtctcttgaagaggccatcagagacctggctgtttgtatcttcctcctctgccatccacagtgtcatcttcacccaaggtggctggagaagctgttaggaatatgtggttttttaaaaattacattcataggaaaaggggagggaagagaagaagaaaacctctccccctaagctcatggctctttttagtcaggctgagccaactaaagtcatgtacttcccttagataggtaactgttgccaggaaaatgccctgtgtggattggcctggactaagcaggatcctcctctaaagagagagatgagatgaatgcctgacccaagtctgggatcttgggtgggaagcgtgtggatagtaggtcagaggtcagcagtgtctgtggtgtaggatgtaatcccatctccacagagctgcatacaagtgtgtttaagtgtgtgcaagtgattaactttgattagtagtttcaactctttacaatgaacatatttatcttttttaaaaaataaagccattttaaaagatcttgccataaaacaatcattccttaagtcaccacttaggatagacctagaatatttgtcctttctcaagagcaccagagagttttctggtaatccacgcaataaacagttataaaaggtaattgttgagatcaggggaagatggcagataggaggcagtgctaatgtgtagctcccacatggatggacaaaacaccatgtggagactcacactgtgaccctgttgtgctccaagaactatcataggaacgtactgggaaaaccaaaagaattcacggatcctttgaaagaagacgcacaccactgtaaattctgtggaacaggagaaaaactgtcttggaggaaggcatccttctattctactgatcagaaagctggacaaagtcccactgccaggctacacagttggtgccatttgcggaggtgacctttgacctttaacccacgcggccacccgcccgagctcttacccctgctgcccctcgcgcgtcccactccccgtccctgccggatccgcttccctgcgctgggcccagcgcgccgccagggaaggggccggagcctgggagcccgccccgccgtcgcccgtcctccgcccgcaggcccacccgcagcggtcacgtgaaggaccgagcgccgcgcgcccaggcggggcctccggcctgcacgaggagggcagagtccgttgcggctgccgccccgacgcccgcgcatccccgctcgccgcgcccgccgccgcgatgtccggggccggcctagccgcggtggtgagctgcctgcgcccgcagcccggcgaggagccgcagacccatgagatatttgggttcttggtctggaccatggtagccgccacccacatagtataccccttgctgcaaggatgggtgatgtatgtctcgctcacctcgtttctcatctccttgatgttcctgttgtcttacttgtttggattttacaaaagatttgaatcctggagagttctggacagcctgtaccacgggaccactggcatcctgtacatgagcgctgccgtcctacaagtacatgccacgattgtttctgagaaactgctggacccaagaatttactacattaattcggcagcctcgttcttcgccttcatcgccacgctgctctacattctccatgccttcagcatctattaccactgatgcacaggcgccaggccaagggggaaatgctctttgaaagctccaattattggtccccaaaagcagcttccaacgtttgccatctggatgacaaacggaagatccactaaaacgtccacgggattaacagaacgtccttgcagactgagcgatgacaccacactttgtttggacatttaaattcactctgctgaataggaggaagcttttctttttcctgggaaaacaactgtctcttggaattatctgaccatgaacttgctcttctagacaactcacatcaaagccctcactccactaatggagaatcctagccccactaatgccaagtctgtttggggattttgcctcagctatgggcttccctagagtaggtctaggggaatactcagtctgatcttttttttgtttgttttattttgttttttttgagacggagtctcgctcttcctccaaggctggagtgcagtgacgcgatctccactcactgcaggctccgcctcccgggttcccgccattctcctgcctcagcctcccgagtagccgggactacaggcgcccaccaccatgcccggctaatttagttgtatttttagtagagatggggtttcaccgtattagccaggatggtctcgatctcctgacctcgtgatccgcccgcctcggcctcccaaagtgctgggattacaggcgtgagccaccgtgcccggcctgattctcttaaaattgaagaggtgctgccaaggccttcagatctaacgcagatgcatagaccttgttcctggtacttgttcagcctgtgctggggagccgtggtcccgagttccctgggaggctgacagggtcaagccaccctgcccaccaccctcccacttcccctcccctttcctctccagcattaggattcaagggaaatctgcatgaagccaattttgagggtagacgtgtggggaaaataaatcattatacagtaagacctggggcttgaggggtggggaatggggagggaagggcatagcctgctcctccatgagtctgacatctcggaaactgagcagctgccggacgcctgggtcaggaatccaagaccccacctcttaaggactggttcctcagaaagcaccctcagggaaaaaggtgaaaacattacatccgtggattctcctgccacaaccgcattggaagaaaaggctgccgcaacatctcagcgaggagtgaaggacccatgtcccaggaaccgcgctgcgccacctgcactcacccccctcacattctcttaagcacccggtggccctccgaggcctggcggaatggtggtgcccacggggttgggcaagggctcaccaggacctcaacgggcaaagttgtgcacactaaaatatcaaatcaaggtgcttggttttaaagtaaatgtttttctaaagaaagctgtgttcttctgttgacccagacgaatagggcacagccctgtaactgcacgtgccttctgtcattgggaatgaaataaattattacgagaaagggacttgtcctaactggtttgaggccttacagttttgtatctacatttttcccctcctggggtttgcggggacagggacagaactacaggagtcatgggaaagaaaattctggcttcactactgctcactgctcactttctgatcactctgatacttttttttttttttttttttgcaacctgataccttgaaaagcttctatgtgtctctccttttgttgcctggcagctgtctaggatgatcactgattactatttactaagtagccacatgcaaataaaagttgtttggtaaaatgga

SEQ ID NO: 29 - DNA, 3034 bp, Homo sapien
tgaatacccagcatagaagctagggcattcaagggaagaacttgccattgtcttttccttttatgtcatcctcttagagttacctcaagtgaaaaggcttttttgtcctgtccattgttttgtgatgcaatccatatgtttgctcttctcatgggaattcagctttttctctgtcaccccctacaggtgctcagcctgtttatcactagggctcagcctcagggcctcccaaggcagccaatacctcatccctggatgttgccgagcatgtttggggtactgtccccacctggggagagactggcatgaccttttgccagatctcttctgagtctatcatgttaagatgggatgatgtacattttaaaattgggttaggccaccatgccacatcataatgggccactttaactgagggtttaatctgtgtccgtcactgttcaagtcctctgcaaatattctcttattactatcacaacaaccccatgggaaggtataatcttagcttgagactgttaagaaaatgtgctttgagttatgatcatatgcttgattttttgtgttagtgtttatagtatatgatcattaaatactgcctcctgctccctagaatttaaaggaaacatgactaagccttaactttcttattttacccagcattagttctttaaagagatgtttgggtgctgtgtagctcctgttcgttgtttataatcacttttgtctttttctcctccagacgttactatttttataaccactagacaacgcaggttgccgcatacttctttatttgtgtagacctcgctcttgccctgtttgaagagcctgagttgcttcccctgcctttcttgatatttgggttcttggtctggaccatggtagccgccacccacatagtataccccttgctgcaaggatgggtgatgtatgtctcgctcacctcgtttctcatctccttgatgttcctgttgtcttacttgtttggattttacaaaagatttgaatcctggagagttctggacagcctgtaccacgggaccactggcatcctgtacatgagcgctgccgtcctacaagtacatgccacgattgtttctgagaaactgctggacccaagaatttactacattaattcggcagcctcgttcttcgccttcatcgccacgctgctctacattctccatgccttcagcatctattaccactgatgcacaggcgccaggccaagggggaaatgctctttgaaagctccaattattggtccccaaaagcagcttccaacgtttgccatctggatgacaaacggaagatccactaaaacgtccacgggattaacagaacgtccttgcagactgagcgatgacaccacactttgtttggacatttaaattcactctgctgaataggaggaagcttttctttttcctgggaaaacaactgtctcttggaattatctgaccatgaacttgctcttctagacaactcacatcaaagccctcactccactaatggagaatcctagccccactaatgccaagtctgtttggggattttgcctcagctatgggcttccctagagtaggtctaggggaatactcagtctgatcttttttttgtttgttttattttgttttttttgagacggagtctcgctcttcctccaaggctggagtgcagtgacgcgatctccactcactgcaggctccgcctcccgggttcccgccattctcctgcctcagcctcccgagtagccgggactacaggcgcccaccaccatgcccggctaatttagttgtatttttagtagagatggggtttcaccgtattagccaggatggtctcgatctcctgacctcgtgatccgcccgcctcggcctcccaaagtgctgggattacaggcgtgagccaccgtgcccggcctgattctcttaaaattgaagaggtgctgccaaggccttcagatctaacgcagatgcatagaccttgttcctggtacttgttcagcctgtgctggggagccgtggtcccgagttccctgggaggctgacagggtcaagccaccctgcccaccaccctcccacttcccctcccctttcctctccagcattaggattcaagggaaatctgcatgaagccaattttgagggtagacgtgtggggaaaataaatcattatacagtaagacctggggcttgaggggtggggaatggggagggaagggcatagcctgctcctccatgagtctgacatctcggaaactgagcagctgccggacgcctgggtcaggaatccaagaccccacctcttaaggactggttcctcagaaagcaccctcagggaaaaaggtgaaaacattacatccgtggattctcctgccacaaccgcattggaagaaaaggctgccgcaacatctcagcgaggagtgaaggacccatgtcccaggaaccgcgctgcgccacctgcactcacccccctcacattctcttaagcacccggtggccctccgaggcctggcggaatggtggtgcccacggggttgggcaagggctcaccaggacctcaacgggcaaagttgtgcacactaaaatatcaaatcaaggtgcttggttttaaagtaaatgtttttctaaagaaagctgtgttcttctgttgacccagacgaatagggcacagccctgtaactgcacgtgccttctgtcattgggaatgaaataaattattacgagaaagggacttgtcctaactggtttgaggccttacagttttgtatctacatttttcccctcctggggtttgcggggacagggacagaactacaggagtcatgggaaagaaaattctggcttcactactgctcactgctcactttctgatcactctgatacttttttttttttttttttttgcaacctgataccttgaaaagcttctatgtgtctctccttttgttgcctggcagctgtctaggatgatcactgattactatttactaagtagccacatgcaaataaaagttgtttggtaaaatgga

SEQ ID NO: 30 - DNA, 2290 bp, Homo sapien
agccctggacagaatgcatggagaagctaactgaggattctagaaaaaaaaaaaaaggagcaggaatatttgggaaggaaaccagaattcaaaacactactaagctgttgatatttgggttcttggtctggaccatggtagccgccacccacatagtataccccttgctgcaaggatgggtgatgtatgtctcgctcacctcgtttctcatctccttgatgttcctgttgtcttacttgtttggattttacaaaagatttgaatcctggagagttctggacagcctgtaccacgggaccactggcatcctgtacatgagcgctgccgtcctacaagtacatgccacgattgtttctgagaaactgctggacccaagaatttactacattaattcggcagcctcgttcttcgccttcatcgccacgctgctctacattctccatgccttcagcatctattaccactgatgcacaggcgccaggccaagggggaaatgctctttgaaagctccaattattggtccccaaaagcagcttccaacgtttgccatctggatgacaaacggaagatccactaaaacgtccacgggattaacagaacgtccttgcagactgagcgatgacaccacactttgtttggacatttaaattcactctgctgaataggaggaagcttttctttttcctgggaaaacaactgtctcttggaattatctgaccatgaacttgctcttctagacaactcacatcaaagccctcactccactaatggagaatcctagccccactaatgccaagtctgtttggggattttgcctcagctatgggcttccctagagtaggtctaggggaatactcagtctgatcttttttttgtttgttttattttgttttttttgagacggagtctcgctcttcctccaaggctggagtgcagtgacgcgatctccactcactgcaggctccgcctcccgggttcccgccattctcctgcctcagcctcccgagtagccgggactacaggcgcccaccaccatgcccggctaatttagttgtatttttagtagagatggggtttcaccgtattagccaggatggtctcgatctcctgacctcgtgatccgcccgcctcggcctcccaaagtgctgggattacaggcgtgagccaccgtgcccggcctgattctcttaaaattgaagaggtgctgccaaggccttcagatctaacgcagatgcatagaccttgttcctggtacttgttcagcctgtgctggggagccgtggtcccgagttccctgggaggctgacagggtcaagccaccctgcccaccaccctcccacttcccctcccctttcctctccagcattaggattcaagggaaatctgcatgaagccaattttgagggtagacgtgtggggaaaataaatcattatacagtaagacctggggcttgaggggtggggaatggggagggaagggcatagcctgctcctccatgagtctgacatctcggaaactgagcagctgccggacgcctgggtcaggaatccaagaccccacctcttaaggactggttcctcagaaagcaccctcagggaaaaaggtgaaaacattacatccgtggattctcctgccacaaccgcattggaagaaaaggctgccgcaacatctcagcgaggagtgaaggacccatgtcccaggaaccgcgctgcgccacctgcactcacccccctcacattctcttaagcacccggtggccctccgaggcctggcggaatggtggtgcccacggggttgggcaagggctcaccaggacctcaacgggcaaagttgtgcacactaaaatatcaaatcaaggtgcttggttttaaagtaaatgtttttctaaagaaagctgtgttcttctgttgacccagacgaatagggcacagccctgtaactgcacgtgccttctgtcattgggaatgaaataaattattacgagaaagggacttgtcctaactggtttgaggccttacagttttgtatctacatttttcccctcctggggtttgcggggacagggacagaactacaggagtcatgggaaagaaaattctggcttcactactgctcactgctcactttctgatcactctgatacttttttttttttttttttttgcaacctgataccttgaaaagcttctatgtgtctctccttttgttgcctggcagctgtctaggatgatcactgattactatttactaagtagccacatgcaaataaaagttgtttggtaaaatgga

SEQ ID NO: 31 - DNA, 1645 bp, Homo sapien
ccctgtccctttccctctcccctcctgggacagactccaggggaggaagcgctgtctcttggaattatctgaccatgaacttgctcttctagacaactcacatcaaagccctcactccactaatggagaatcctagccccactaatgccaagtctgtttggggattttgcctcagctatgggcttccctagagtaggtctaggggaatactcagtctgatcttttttttgtttgttttattttgttttttttgagacggagtctcgctcttcctccaaggctggagtgcagtgacgcgatctccactcactgcaggctccgcctcccgggttcccgccattctcctgcctcagcctcccgagtagccgggactacaggcgcccaccaccatgcccggctaatttagttgtatttttagtagagatggggtttcaccgtattagccaggatggtctcgatctcctgacctcgtgatccgcccgcctcggcctcccaaagtgctgggattacaggcgtgagccaccgtgcccggcctgattctcttaaaattgaagaggtgctgccaaggccttcagatctaacgcagatgcatagaccttgttcctggtacttgttcagcctgtgctggggagccgtggtcccgagttccctgggaggctgacagggtcaagccaccctgcccaccaccctcccacttcccctcccctttcctctccagcattaggattcaagggaaatctgcatgaagccaattttgagggtagacgtgtggggaaaataaatcattatacagtaagacctggggcttgaggggtggggaatggggagggaagggcatagcctgctcctccatgagtctgacatctcggaaactgagcagctgccggacgcctgggtcaggaatccaagaccccacctcttaaggactggttcctcagaaagcaccctcagggaaaaaggtgaaaacattacatccgtggattctcctgccacaaccgcattggaagaaaaggctgccgcaacatctcagcgaggagtgaaggacccatgtcccaggaaccgcgctgcgccacctgcactcacccccctcacattctcttaagcacccggtggccctccgaggcctggcggaatggtggtgcccacggggttgggcaagggctcaccaggacctcaacgggcaaagttgtgcacactaaaatatcaaatcaaggtgcttggttttaaagtaaatgtttttctaaagaaagctgtgttcttctgttgacccagacgaatagggcacagccctgtaactgcacgtgccttctgtcattgggaatgaaataaattattacgagaaagggacttgtcctaactggtttgaggccttacagttttgtatctacatttttcccctcctggggtttgcggggacagggacagaactacaggagtcatgggaaagaaaattctggcttcactactgctcactgctcactttctgatcactctgatacttttttttttttttttttttgcaacctgataccttgaaaagcttctatgtgtctctccttttgttgcctggcagctgtctaggatgatcactgattactatttactaagtagccacatgcaaataaaagttgtttggtaaaatgga

SEQ ID NO: 32 - DNA, 1561 bp, Homo sapien
ccctgggtcaggaatccaagaccccacctcttaaggacggttcctcagaaagccccactaatgccaagtctgtttggggattttgcctcagctatgggcttccctagagtaggtctaggggaatactcagtctgatcttttttttgtttgttttattttgttttttttgagacggagtctcgctcttcctccaaggctggagtgcagtgacgcgatctccactcactgcaggctccgcctcccgggttcccgccattctcctgcctcagcctcccgagtagccgggactacaggcgcccaccaccatgcccggctaatttagttgtatttttagtagagatggggtttcaccgtattagccaggatggtctcgatctcctgacctcgtgatccgcccgcctcggcctcccaaagtgctgggattacaggcgtgagccaccgtgcccggcctgattctcttaaaattgaagaggtgctgccaaggccttcagatctaacgcagatgcatagaccttgttcctggtacttgttcagcctgtgctggggagccgtggtcccgagttccctgggaggctgacagggtcaagccaccctgcccaccaccctcccacttcccctcccctttcctctccagcattaggattcaagggaaatctgcatgaagccaattttgagggtagacgtgtggggaaaataaatcattatacagtaagacctggggcttgaggggtggggaatggggagggaagggcatagcctgctcctccatgagtctgacatctcggaaactgagcagctgccggacgcctgggtcaggaatccaagaccccacctcttaaggactggttcctcagaaagcaccctcagggaaaaaggtgaaaacattacatccgtggattctcctgccacaaccgcattggaagaaaaggctgccgcaacatctcagcgaggagtgaaggacccatgtcccaggaaccgcgctgcgccacctgcactcacccccctcacattctcttaagcacccggtggccctccgaggcctggcggaatggtggtgcccacggggttgggcaagggctcaccaggacctcaacgggcaaagttgtgcacactaaaatatcaaatcaaggtgcttggttttaaagtaaatgtttttctaaagaaagctgtgttcttctgttgacccagacgaatagggcacagccctgtaactgcacgtgccttctgtcattgggaatgaaataaattattacgagaaagggacttgtcctaactggtttgaggccttacagttttgtatctacatttttcccctcctggggtttgcggggacagggacagaactacaggagtcatgggaaagaaaattctggcttcactactgctcactgctcactttctgatcactctgatacttttttttttttttttttttgcaacctgataccttgaaaagcttctatgtgtctctccttttgttgcctggcagctgtctaggatgatcactgattactatttactaagtagccacatgcaaataaaagttgtttggtaaaatgga

SEQ ID NO: 33 - DNA, 3831 bp, Homo sapien
taaagaggtaatccaagtaaaatgaggtccttagagcaggccctgatccaataggactgtccttattagaagaggaaacttggacacagatacacacagagggagcaccgtgtgaagacacagagaggagatggccagctaccagccaagcagagagcccttactgtaaaccaaccctgccgcatcctgatctcagaattttggcttccagaactgtaaggaaacacatttctactgtttaagccacttggctgggagtacttggttatggcagcctgagcagactaaaccagcacctcaaagagttgttatagggtatgcttagtggtaactggttcctaaaggccttgctttctaaggctgactcctcaccctgcaaggatgcattctccccactggcagatatgcaaccaggaacaggcattaacacgctttattcccagagttttaatattttccattgcataaaatatttgttcatgaaaatgacaaaattgctattagattctatcaccacatctctgttgattttactttctgcaaacacatacaagtaatgtaggcatacagttaaaaatgaaaccttatcctgtagttccagctactagggaggctgaagcaagagaatggcatgaacctgggaggcggagcttgtcgtgagcccagatcaggccactacactccagccggggcaacagagcgcaactccgtctcaaaacaaacaaacaaaacaaaacaaaaaaaacttatagacaagtacaaaatgagaagaaaaagtccctttcccttcatgcctctacttcctgctgtattctcaaaggtaagcactgattacagtttacttatggatctttccaggaaaatattttatgcatttatcagaaaatgtaagtatatgcatcctttaaaattctgcataaatcaaactctgcagggtactatcttcccatcctcatttgatattttgtagatcttttcctattggctgtacagatcacctcattctgtctcctgggtcatacaatatagctcacataattctaagtctgaaggttggtccaaatggttccaagaatgcaggtaccaaaaagtagtctcttgaagaggccatcagagacctggctgtttgtatcttcctcctctgccatccacagtgtcatcttcacccaaggtggctggagaagctgttaggaatatgtggttttttaaaaattacattcataggaaaaggggagggaagagaagaagaaaacctctccccctaagctcatggctctttttagtcaggctgagccaactaaagtcatgtacttcccttagataggtaactgttgccaggaaaatgccctgtgtggattggcctggactaagcaggatcctcctctaaagagagagatgagatgaatgcctgacccaagtctgggatcttgggtgggaagcgtgtggatagtaggtcagaggtcagcagtgtctgtggtgtaggatgtaatcccatctccacagagctgcatacaagtgtgtttaagtgtgtgcaagtgattaactttgattagtagtttcaactctttacaatgaacatatttatcttttttaaaaaataaagccattttaaaagatcttgccataaaacaatcattccttaagtcaccacttaggatagacctagaatatttgtcctttctcaagagcaccagagagttttctggtaatccacgcaataaacagttataaaaggtaattgttgagatcaggggaagatggcagataggaggcagtgctaatgtgtagctcccacatggatggacaaaacaccatgtggagactcacactgtgaccctgttgtgctccaagaactatcataggaacgtactgggaaaaccaaaagaattcacggatcctttgaaagaagacgcacaccactgtaaattctgtggaacaggagaaaaactgtcttggaggaaggcatccttctattctactgatcagaaagctggacaaagtcccactgccaggctacacagttggtgccatttgcggaggtgacctttgacctttaacccacgcggccacccgcccgagctcttacccctgctgcccctcgcgcgtcccactccccgtccctgccggatccgcttccctgcgctgggcccagcgcgccgccagggaaggggccggagcctgggagcccgccccgccgtcgcccgtcctccgcccgcaggcccacccgcagcggtcacgtgaaggaccgagcgccgcgcgcccaggcggggcctccggcctgcacgaggagggcagagtccgttgcggctgccgccccgacgcccgcgcatccccgctcgccgcgcccgccgccgcgatgtccggggccggcctagccgcggtggtgagctgcctgcgcccgcagcccggcgaggagccgcagacccatgaggaccttctcctggcagctgcctatgttttggatgcccagtacaacagaaatgttccatttgaaactcacctcaggccatcagacgttactatttttataaccactagacaacgcaggttgccgcatacttctttatttgtgtagacctcgctcttgccctgtttgaagagcctgagttgcttcccctgcctttcttgatatttgggttcttggtctggaccatggtagccgccacccacatagtataccccttgctgcaaggatgggtgatgtatgtctcgctcacctcgtttctcatctccttgatgttcctgttgtcttacttgtttggattttacaaaagatttgaatcctggagagttctggacagcctgtaccacgggaccactggcatcctgtacatgagcgctgccgtcctacaagtacatgccacgattgtttctgagaaactgctggacccaagaatttactacattaattcggcagcctcgatctgcatgaagccaattttgagggtagacgtgtggggaaaataaatcattatacagtaagacctggggcttgaggggtggggaatggggagggaagggcatagcctgctcctccatgagtctgacatctcggaaactgagcagctgccggacgcctgggtcaggaatccaagaccccacctcttaaggactggttcctcagaaagcaccctcagggaaaaaggtgaaaacattacatccgtggattctcctgccacaaccgcattggaagaaaaggctgccgcaacatctcagcgaggagtgaaggacccatgtcccaggaaccgcgctgcgccacctgcactcacccccctcacattctcttaagcacccggtggccctccgaggcctggcggaatggtggtgcccacggggttgggcaagggctcaccaggacctcaacgggcaaagttgtgcacactaaaatatcaaatcaaggtgcttggttttaaagtaaatgtttttctaaagaaagctgtgttcttctgttgacccagacgaatagggcacagccctgtaactgcacgtgccttctgtcattgggaatgaaataaattattacgagaaagggacttgtcctaactggtttgaggccttacagttttgtatctacatttttcccctcctggggtttgcggggacagggacagaactacaggagtcatgggaaagaaaattctggcttcactactgctcactgctcactttctgatcactctgatacttttttttttttttttttttgcaacctgataccttgaaaagcttctatgtgtctctccttttgttgcctggcagctgtctaggatgatcactgattactatttactaagtagccacatgcaaataaaagttgtttggtaaaatgga

SEQ ID NO: 34 - DNA, 3106 bp, Homo sapien
taaagaggtaatccaagtaaaatgaggtccttagagcaggccctgatccaataggactgtccttattagaagaggaaacttggacacagatacacacagagggagcaccgtgtgaagacacagagaggagatggccagctaccagccaagcagagagcccttactgtaaaccaaccctgccgcatcctgatctcagaattttggcttccagaactgtaaggaaacacatttctactgtttaagccacttggctgggagtacttggttatggcagcctgagcagactaaaccagcacctcaaagagttgttatagggtatgcttagtggtaactggttcctaaaggccttgctttctaaggctgactcctcaccctgcaaggatgcattctccccactggcagatatgcaaccaggaacaggcattaacacgctttattcccagagttttaatattttccattgcataaaatatttgttcatgaaaatgacaaaattgctattagattctatcaccacatctctgttgattttactttctgcaaacacatacaagtaatgtaggcatacagttaaaaatgaaaccttatcctgtagttccagctactagggaggctgaagcaagagaatggcatgaacctgggaggcggagcttgtcgtgagcccagatcaggccactacactccagccggggcaacagagcgcaactccgtctcaaaacaaacaaacaaaacaaaacaaaaaaaacttatagacaagtacaaaatgagaagaaaaagtccctttcccttcatgcctctacttcctgctgtattctcaaaggtaagcactgattacagtttacttatggatctttccaggaaaatattttatgcatttatcagaaaatgtaagtatatgcatcctttaaaattctgcataaatcaaactctgcagggtactatcttcccatcctcatttgatattttgtagatcttttcctattggctgtacagatcacctcattctgtctcctgggtcatacaatatagctcacataattctaagtctgaaggttggtccaaatggttccaagaatgcaggtaccaaaaagtagtctcttgaagaggccatcagagacctggctgtttgtatcttcctcctctgccatccacagtgtcatcttcacccaaggtggctggagaagctgttaggaatatgtggttttttaaaaattacattcataggaaaaggggagggaagagaagaagaaaacctctccccctaagctcatggctctttttagtcaggctgagccaactaaagtcatgtacttcccttagataggtaactgttgccaggaaaatgccctgtgtggattggcctggactaagcaggatcctcctctaaagagagagatgagatgaatgcctgacccaagtctgggatcttgggtgggaagcgtgtggatagtaggtcagaggtcagcagtgtctgtggtgtaggatgtaatcccatctccacagagctgcatacaagtgtgtttaagtgtgtgcaagtgattaactttgattagtagtttcaactctttacaatgaacatatttatcttttttaaaaaataaagccattttaaaagatcttgccataaaacaatcattccttaagtcaccacttaggatagacctagaatatttgtcctttctcaagagcaccagagagttttctggtaatccacgcaataaacagttataaaaggtaattgttgagatcaggggaagatggcagataggaggcagtgctaatgtgtagctcccacatggatggacaaaacaccatgtggagactcacactgtgaccctgttgtgctccaagaactatcataggaacgtactgggaaaaccaaaagaattcacggatcctttgaaagaagacgcacaccactgtaaattctgtggaacaggagaaaaactgtcttggaggaaggcatccttctattctactgatcagaaagctggacaaagtcccactgccaggctacacagttggtgccatttgcggaggtgacctttgacctttaacccacgcggccacccgcccgagctcttacccctgctgcccctcgcgcgtcccactccccgtccctgccggatccgcttccctgcgctgggcccagcgcgccgccagggaaggggccggagcctgggagcccgccccgccgtcgcccgtcctccgcccgcaggcccacccgcagcggtcacgtgaaggaccgagcgccgcgcgcccaggcggggcctccggcctgcacgaggagggcagagtccgttgcggctgccgccccgacgcccgcgcatccccgctcgccgcgcccgccgccgcgatgtccggggccggcctagccgcggtggtgagctgcctgcgcccgcagcccggcgaggagccgcagacccatgaggaccttctcctggcagctgcctatgttttggatgcccagtacaacagaaatgttccatttgaaactcacctcaggccatcagacgttactatttttataaccactagacaacgcaggttgccgcatacttctttatttgtgtagacctcgctcttgccctgtttgaagagcctgagttgcttcccctgcctttcttggccacctcaatagcagaagtactctgcctgactgcatactttggcagactggtacattttgcaaaagtcactcctcaaatggttttctggaaggatacaaaagacatctgcaccatggtaaccacagtggcgagtgttcattgtagtacctgtaagagtttatgaccgaaggcaggagccatgaagaaaaaagactcaatagatttgcttttgatgaaacaacaacacttccatacagtgaacgccataagcacaactgcaagcaaaccgcaaactgaagaacaaatagggcaaaatgtggcagtgcagacatttcagcatatcaagagcacttccaaattacaggaaaaaaaagatatctcaatagataattttgctgaagataagtgaaggcaactcataaggaaaaaatatgtaaaatggccgataggaaagatgtttaacgtcactaattaaaaattatagaataaaacgacaa

SEQ ID NO: 35 - DNA, 3024 bp, Homo sapien
taaagaggtaatccaagtaaaatgaggtccttagagcaggccctgatccaataggactgtccttattagaagaggaaacttggacacagatacacacagagggagcaccgtgtgaagacacagagaggagatggccagctaccagccaagcagagagcccttactgtaaaccaaccctgccgcatcctgatctcagaattttggcttccagaactgtaaggaaacacatttctactgtttaagccacttggctgggagtacttggttatggcagcctgagcagactaaaccagcacctcaaagagttgttatagggtatgcttagtggtaactggttcctaaaggccttgctttctaaggctgactcctcaccctgcaaggatgcattctccccactggcagatatgcaaccaggaacaggcattaacacgctttattcccagagttttaatattttccattgcataaaatatttgttcatgaaaatgacaaaattgctattagattctatcaccacatctctgttgattttactttctgcaaacacatacaagtaatgtaggcatacagttaaaaatgaaaccttatcctgtagttccagctactagggaggctgaagcaagagaatggcatgaacctgggaggcggagcttgtcgtgagcccagatcaggccactacactccagccggggcaacagagcgcaactccgtctcaaaacaaacaaacaaaacaaaacaaaaaaaacttatagacaagtacaaaatgagaagaaaaagtccctttcccttcatgcctctacttcctgctgtattctcaaaggtaagcactgattacagtttacttatggatctttccaggaaaatattttatgcatttatcagaaaatgtaagtatatgcatcctttaaaattctgcataaatcaaactctgcagggtactatcttcccatcctcatttgatattttgtagatcttttcctattggctgtacagatcacctcattctgtctcctgggtcatacaatatagctcacataattctaagtctgaaggttggtccaaatggttccaagaatgcaggtaccaaaaagtagtctcttgaagaggccatcagagacctggctgtttgtatcttcctcctctgccatccacagtgtcatcttcacccaaggtggctggagaagctgttaggaatatgtggttttttaaaaattacattcataggaaaaggggagggaagagaagaagaaaacctctccccctaagctcatggctctttttagtcaggctgagccaactaaagtcatgtacttcccttagataggtaactgttgccaggaaaatgccctgtgtggattggcctggactaagcaggatcctcctctaaagagagagatgagatgaatgcctgacccaagtctgggatcttgggtgggaagcgtgtggatagtaggtcagaggtcagcagtgtctgtggtgtaggatgtaatcccatctccacagagctgcatacaagtgtgtttaagtgtgtgcaagtgattaactttgattagtagtttcaactctttacaatgaacatatttatcttttttaaaaaataaagccattttaaaagatcttgccataaaacaatcattccttaagtcaccacttaggatagacctagaatatttgtcctttctcaagagcaccagagagttttctggtaatccacgcaataaacagttataaaaggtaattgttgagatcaggggaagatggcagataggaggcagtgctaatgtgtagctcccacatggatggacaaaacaccatgtggagactcacactgtgaccctgttgtgctccaagaactatcataggaacgtactgggaaaaccaaaagaattcacggatcctttgaaagaagacgcacaccactgtaaattctgtggaacaggagaaaaactgtcttggaggaaggcatccttctattctactgatcagaaagctggacaaagtcccactgccaggctacacagttggtgccatttgcggaggtgacctttgacctttaacccacgcggccacccgcccgagctcttacccctgctgcccctcgcgcgtcccactccccgtccctgccggatccgcttccctgcgctgggcccagcgcgccgccagggaaggggccggagcctgggagcccgccccgccgtcgcccgtcctccgcccgcaggcccacccgcagcggtcacgtgaaggaccgagcgccgcgcgcccaggcggggcctccggcctgcacgaggagggcagagtccgttgcggctgccgccccgacgcccgcgcatccccgctcgccgcgcccgccgccgcgatgtccggggccggcctagccgcggtggtgagctgcctgcgcccgcagcccggcgaggagccgcagacccatgagacgttactatttttataaccactagacaacgcaggttgccgcatacttctttatttgtgtagacctcgctcttgccctgtttgaagagcctgagttgcttcccctgcctttcttggccacctcaatagcagaagtactctgcctgactgcatactttggcagactggtacattttgcaaaagtcactcctcaaatggttttctggaaggatacaaaagacatctgcaccatggtaaccacagtggcgagtgttcattgtagtacctgtaagagtttatgaccgaaggcaggagccatgaagaaaaaagactcaatagatttgcttttgatgaaacaacaacacttccatacagtgaacgccataagcacaactgcaagcaaaccgcaaactgaagaacaaatagggcaaaatgtggcagtgcagacatttcagcatatcaagagcacttccaaattacaggaaaaaaaagatatctcaatagataattttgctgaagataagtgaaggcaactcataaggaaaaaatatgtaaaatggccgataggaaagatgtttaacgtcactaattaaaaattatagaataaaacgacaa

SEQ ID NO: 36 - DNA, 2429 bp, Homo sapien
aagattaatattttgtgacacatggaagtgatatgaaatacaaattttgctgtctgcaaataatgttttatgggaacatagccacacttattaatttatgtgttgtctttggctgctttggagctacatcaacagtttagtggttgtgacagagactgtaagacttgcaaagcttcacatgtttactttaacagaaagagttcactaacccctagctttagagaacaacagccttttattatctcccatgactctgtgggacattggctcaggtggtgtggctggggtggtagatgtctggaagctcttagatctctggaggctggaacatcaaggtagctctctcacgtggctggcaggagctgctggctgtagctgtggccccggccctcttctatgtagctgctccacgtggcttaggcttttcccagtgggtggctgggtccaggaaggagcatcccagtgtgctgcaccatcaaacctctgcttgcatcatacttgctgatgtcctgttgtcaatcacatgccaaaacctgagtcaacttgggaggccactgcaaagggggtgaaaactgtaagtatggctcactggggctgcccaagtgacatccaccaactgtcttacaataaagatccggcaattaatgaattctctggatagaagacttttatcccaataacagtcaacacaaacacaaaatctgaagaaacagagctgtgcattcacaaacctggacagagtgttgtctatccctccttagcactggtccactctggccaaggtaggaatcccacagagtggtcttcttagccatttgcctcttttcctgagtcctcatcccctgtctgttattggtcatgtataactttgggttggctgcctgagtttcagagtgttccttcagccagcccttgtactgtaaatctccaaagtccagtgtgttctgagggctttggcccccatccagcattaccacgcaagtcttgttttaagcaaggatgtcctgaaattgcctaaggcccttttgcaaagctggacttgacattgggtctctatagctcttcaagagtcaacagactgagagctagaacatttgcaaggggctgcagcccagtctgtgcacagacccatgagggctggaactagggggcaatgatagtgtcccctgctgctttcaggcccacagccagccccttcctcctgtctctagctctcactcaagacttttccctctttttagcctaagtcaagttgtccctttctccatctcttcctatcttccacctgtctctccctattgatggaggaacgtgcccttgttaggaagttgttactgcatcccaacagcctcaggcatgggcttcaagtctagcaggtacaggagtctggagttggcacccgtaatctacagagggaggcccatcaggacttcggtcttgatctcagtgggctccatcctcgtctctaaccagcctcatataggcagcagggctgcagtggcagtgatgtttatggaaggacccattattcccaaacacatctttggggaattaccttaccgttagagaaatgggacttctaggtgtctggaatttgaacatggggaatttgagagcatagacgatctctgcctctgacctcccccttttctggggaaatgtgttcttggtcctcagcctgctggtgcagcccctcccaggaatccctgccagtgtgggtcatggagattgtgactcagtggcagatttccctttcagaggaagaagccattctaaccggcagaaaatgttgctgcaattttcagtaaaattaagggacatgacaaattctcagagggtgccaggcaggaaaggtagggtagtggcaggggacagggggtggtactggataactaaagctgagcctccccatggcaagccctcgtgctcagcctctgttttctccttgcaggccacctcaatagcagaagtactctgcctgactgcatactttggcagactggtacattttgcaaaagtcactcctcaaatggttttctggaaggatacaaaagacatctgcaccatggtaaccacagtggcgagtgttcattgtagtacctgtaagagtttatgaccgaaggcaggagccatgaagaaaaaagactcaatagatttgcttttgatgaaacaacaacacttccatacagtgaacgccataagcacaactgcaagcaaaccgcaaactgaagaacaaatagggcaaaatgtggcagtgcagacatttcagcatatcaagagcacttccaaattacaggaaaaaaaagatatctcaatagataattttgctgaagataagtgaaggcaactcataaggaaaaaatatgtaaaatggccgataggaaagatgtttaacgtcactaattaaaaattatagaataaaacgacaa

SEQ ID NO: 37 - DNA, 2909 bp, Homo sapien
taaagaggtaatccaagtaaaatgaggtccttagagcaggccctgatccaataggactgtccttattagaagaggaaacttggacacagatacacacagagggagcaccgtgtgaagacacagagaggagatggccagctaccagccaagcagagagcccttactgtaaaccaaccctgccgcatcctgatctcagaattttggcttccagaactgtaaggaaacacatttctactgtttaagccacttggctgggagtacttggttatggcagcctgagcagactaaaccagcacctcaaagagttgttatagggtatgcttagtggtaactggttcctaaaggccttgctttctaaggctgactcctcaccctgcaaggatgcattctccccactggcagatatgcaaccaggaacaggcattaacacgctttattcccagagttttaatattttccattgcataaaatatttgttcatgaaaatgacaaaattgctattagattctatcaccacatctctgttgattttactttctgcaaacacatacaagtaatgtaggcatacagttaaaaatgaaaccttatcctgtagttccagctactagggaggctgaagcaagagaatggcatgaacctgggaggcggagcttgtcgtgagcccagatcaggccactacactccagccggggcaacagagcgcaactccgtctcaaaacaaacaaacaaaacaaaacaaaaaaaacttatagacaagtacaaaatgagaagaaaaagtccctttcccttcatgcctctacttcctgctgtattctcaaaggtaagcactgattacagtttacttatggatctttccaggaaaatattttatgcatttatcagaaaatgtaagtatatgcatcctttaaaattctgcataaatcaaactctgcagggtactatcttcccatcctcatttgatattttgtagatcttttcctattggctgtacagatcacctcattctgtctcctgggtcatacaatatagctcacataattctaagtctgaaggttggtccaaatggttccaagaatgcaggtaccaaaaagtagtctcttgaagaggccatcagagacctggctgtttgtatcttcctcctctgccatccacagtgtcatcttcacccaaggtggctggagaagctgttaggaatatgtggttttttaaaaattacattcataggaaaaggggagggaagagaagaagaaaacctctccccctaagctcatggctctttttagtcaggctgagccaactaaagtcatgtacttcccttagataggtaactgttgccaggaaaatgccctgtgtggattggcctggactaagcaggatcctcctctaaagagagagatgagatgaatgcctgacccaagtctgggatcttgggtgggaagcgtgtggatagtaggtcagaggtcagcagtgtctgtggtgtaggatgtaatcccatctccacagagctgcatacaagtgtgtttaagtgtgtgcaagtgattaactttgattagtagtttcaactctttacaatgaacatatttatcttttttaaaaaataaagccattttaaaagatcttgccataaaacaatcattccttaagtcaccacttaggatagacctagaatatttgtcctttctcaagagcaccagagagttttctggtaatccacgcaataaacagttataaaaggtaattgttgagatcaggggaagatggcagataggaggcagtgctaatgtgtagctcccacatggatggacaaaacaccatgtggagactcacactgtgaccctgttgtgctccaagaactatcataggaacgtactgggaaaaccaaaagaattcacggatcctttgaaagaagacgcacaccactgtaaattctgtggaacaggagaaaaactgtcttggaggaaggcatccttctattctactgatcagaaagctggacaaagtcccactgccaggctacacagttggtgccatttgcggaggtgacctttgacctttaacccacgcggccacccgcccgagctcttacccctgctgcccctcgcgcgtcccactccccgtccctgccggatccgcttccctgcgctgggcccagcgcgccgccagggaaggggccggagcctgggagcccgccccgccgtcgcccgtcctccgcccgcaggcccacccgcagcggtcacgtgaaggaccgagcgccgcgcgcccaggcggggcctccggcctgcacgaggagggcagagtccgttgcggctgccgccccgacgcccgcgcatccccgctcgccgcgcccgccgccgcgatgtccggggccggcctagccgcggtggtgagctgcctgcgcccgcagcccggcgaggagccgcagacccatgaggccacctcaatagcagaagtactctgcctgactgcatactttggcagactggtacattttgcaaaagtcactcctcaaatggttttctggaaggatacaaaagacatctgcaccatggtaaccacagtggcgagtgttcattgtagtacctgtaagagtttatgaccgaaggcaggagccatgaagaaaaaagactcaatagatttgcttttgatgaaacaacaacacttccatacagtgaacgccataagcacaactgcaagcaaaccgcaaactgaagaacaaatagggcaaaatgtggcagtgcagacatttcagcatatcaagagcacttccaaattacaggaaaaaaaagatatctcaatagataattttgctgaagataagtgaaggcaactcataaggaaaaaatatgtaaaatggccgataggaaagatgtttaacgtcactaattaaaaattatagaataaaacgacaa

SEQ ID NO: 38 - DNA, 3412 bp, Homo sapien
taaagaggtaatccaagtaaaatgaggtccttagagcaggccctgatccaataggactgtccttattagaagaggaaacttggacacagatacacacagagggagcaccgtgtgaagacacagagaggagatggccagctaccagccaagcagagagcccttactgtaaaccaaccctgccgcatcctgatctcagaattttggcttccagaactgtaaggaaacacatttctactgtttaagccacttggctgggagtacttggttatggcagcctgagcagactaaaccagcacctcaaagagttgttatagggtatgcttagtggtaactggttcctaaaggccttgctttctaaggctgactcctcaccctgcaaggatgcattctccccactggcagatatgcaaccaggaacaggcattaacacgctttattcccagagttttaatattttccattgcataaaatatttgttcatgaaaatgacaaaattgctattagattctatcaccacatctctgttgattttactttctgcaaacacatacaagtaatgtaggcatacagttaaaaatgaaaccttatcctgtagttccagctactagggaggctgaagcaagagaatggcatgaacctgggaggcggagcttgtcgtgagcccagatcaggccactacactccagccggggcaacagagcgcaactccgtctcaaaacaaacaaacaaaacaaaacaaaaaaaacttatagacaagtacaaaatgagaagaaaaagtccctttcccttcatgcctctacttcctgctgtattctcaaaggtaagcactgattacagtttacttatggatctttccaggaaaatattttatgcatttatcagaaaatgtaagtatatgcatcctttaaaattctgcataaatcaaactctgcagggtactatcttcccatcctcatttgatattttgtagatcttttcctattggctgtacagatcacctcattctgtctcctgggtcatacaatatagctcacataattctaagtctgaaggttggtccaaatggttccaagaatgcaggtaccaaaaagtagtctcttgaagaggccatcagagacctggctgtttgtatcttcctcctctgccatccacagtgtcatcttcacccaaggtggctggagaagctgttaggaatatgtggttttttaaaaattacattcataggaaaaggggagggaagagaagaagaaaacctctccccctaagctcatggctctttttagtcaggctgagccaactaaagtcatgtacttcccttagataggtaactgttgccaggaaaatgccctgtgtggattggcctggactaagcaggatcctcctctaaagagagagatgagatgaatgcctgacccaagtctgggatcttgggtgggaagcgtgtggatagtaggtcagaggtcagcagtgtctgtggtgtaggatgtaatcccatctccacagagctgcatacaagtgtgtttaagtgtgtgcaagtgattaactttgattagtagtttcaactctttacaatgaacatatttatcttttttaaaaaataaagccattttaaaagatcttgccataaaacaatcattccttaagtcaccacttaggatagacctagaatatttgtcctttctcaagagcaccagagagttttctggtaatccacgcaataaacagttataaaaggtaattgttgagatcaggggaagatggcagataggaggcagtgctaatgtgtagctcccacatggatggacaaaacaccatgtggagactcacactgtgaccctgttgtgctccaagaactatcataggaacgtactgggaaaaccaaaagaattcacggatcctttgaaagaagacgcacaccactgtaaattctgtggaacaggagaaaaactgtcttggaggaaggcatccttctattctactgatcagaaagctggacaaagtcccactgccaggctacacagttggtgccatttgcggaggtgacctttgacctttaacccacgcggccacccgcccgagctcttacccctgctgcccctcgcgcgtcccactccccgtccctgccggatccgcttccctgcgctgggcccagcgcgccgccagggaaggggccggagcctgggagcccgccccgccgtcgcccgtcctccgcccgcaggcccacccgcagcggtcacgtgaaggaccgagcgccgcgcgcccaggcggggcctccggcctgcacgaggagggcagagtccgttgcggctgccgccccgacgcccgcgcatccccgctcgccgcgcccgccgccgcgatgtccggggccggcctagccgcggtggtgagctgcctgcgcccgcagcccggcgaggagccgcagacccatgaggaccttctcctggcagctgcctatgttttggatgcccagtacaacagaaatgttccatttgaaactcacctcaggccatcagacgttactatttttataaccactagacaacgcaggttgccgcatacttctttatttgtgtagacctcgctcttgccctgtttgaagagcctgagttgcttcccctgcctttcttggccacctcaatagcagaagtactctgcctgactgcatactttggcagactggtacattttgcaaaagtcactcctcaaatggttttctggaaggatacaaaagacatctgcaccatggtaaccacagtggcgagtgttcattgtagtacctgtaagagtttatgaccgaaggcaggagccatgaagaaaaaagactcaatagatttgcttttgatgaaacaacaacacttccatacagtgaacgccataagcacaactgcaagcaaaccgcaaactgaagaacaaatagggcaaaatgtggcagtgcagacatttcagcatatcaagagcacttccaaattacaggaaaaaaaagatatctcaatagataattttgctgaagataagtgaaggcaactcataaggaaaaaatatgtaaaatggccgataggaaagatgtttaacgtcactaattaaaaattatagaataaaacgacaataaaataccatgtgtttgcctataaaacaatcttagcaagattgaaaacaaactttttgtaatttccaatttttagtttagattcaggtggtacatgtgcaggtttgttacatgggtatatttcgtgatggtgaggtttggggtacaactgatcccatcactcaggtagtgagcctagaatccagcaggtagtttttcaacccttcccctcctctgtcccttcccctcaggaatccccagtgtctactgttgccatctttgtgtccatgagtacccagtgtttagctcctacttataagtgacaac

SEQ ID NO: 39 - DNA, 3048 bp, Homo sapien
taaagaggtaatccaagtaaaatgaggtccttagagcaggccctgatccaataggactgtccttattagaagaggaaacttggacacagatacacacagagggagcaccgtgtgaagacacagagaggagatggccagctaccagccaagcagagagcccttactgtaaaccaaccctgccgcatcctgatctcagaattttggcttccagaactgtaaggaaacacatttctactgtttaagccacttggctgggagtacttggttatggcagcctgagcagactaaaccagcacctcaaagagttgttatagggtatgcttagtggtaactggttcctaaaggccttgctttctaaggctgactcctcaccctgcaaggatgcattctccccactggcagatatgcaaccaggaacaggcattaacacgctttattcccagagttttaatattttccattgcataaaatatttgttcatgaaaatgacaaaattgctattagattctatcaccacatctctgttgattttactttctgcaaacacatacaagtaatgtaggcatacagttaaaaatgaaaccttatcctgtagttccagctactagggaggctgaagcaagagaatggcatgaacctgggaggcggagcttgtcgtgagcccagatcaggccactacactccagccggggcaacagagcgcaactccgtctcaaaacaaacaaacaaaacaaaacaaaaaaaacttatagacaagtacaaaatgagaagaaaaagtccctttcccttcatgcctctacttcctgctgtattctcaaaggtaagcactgattacagtttacttatggatctttccaggaaaatattttatgcatttatcagaaaatgtaagtatatgcatcctttaaaattctgcataaatcaaactctgcagggtactatcttcccatcctcatttgatattttgtagatcttttcctattggctgtacagatcacctcattctgtctcctgggtcatacaatatagctcacataattctaagtctgaaggttggtccaaatggttccaagaatgcaggtaccaaaaagtagtctcttgaagaggccatcagagacctggctgtttgtatcttcctcctctgccatccacagtgtcatcttcacccaaggtggctggagaagctgttaggaatatgtggttttttaaaaattacattcataggaaaaggggagggaagagaagaagaaaacctctccccctaagctcatggctctttttagtcaggctgagccaactaaagtcatgtacttcccttagataggtaactgttgccaggaaaatgccctgtgtggattggcctggactaagcaggatcctcctctaaagagagagatgagatgaatgcctgacccaagtctgggatcttgggtgggaagcgtgtggatagtaggtcagaggtcagcagtgtctgtggtgtaggatgtaatcccatctccacagagctgcatacaagtgtgtttaagtgtgtgcaagtgattaactttgattagtagtttcaactctttacaatgaacatatttatcttttttaaaaaataaagccattttaaaagatcttgccataaaacaatcattccttaagtcaccacttaggatagacctagaatatttgtcctttctcaagagcaccagagagttttctggtaatccacgcaataaacagttataaaaggtaattgttgagatcaggggaagatggcagataggaggcagtgctaatgtgtagctcccacatggatggacaaaacaccatgtggagactcacactgtgaccctgttgtgctccaagaactatcataggaacgtactgggaaaaccaaaagaattcacggatcctttgaaagaagacgcacaccactgtaaattctgtggaacaggagaaaaactgtcttggaggaaggcatccttctattctactgatcagaaagctggacaaagtcccactgccaggctacacagttggtgccatttgcggaggtgacctttgacctttaacccacgcggccacccgcccgagctcttacccctgctgcccctcgcgcgtcccactccccgtccctgccggatccgcttccctgcgctgggcccagcgcgccgccagggaaggggccggagcctgggagcccgccccgccgtcgcccgtcctccgcccgcaggcccacccgcagcggtcacgtgaaggaccgagcgccgcgcgcccaggcggggcctccggcctgcacgaggagggcagagtccgttgcggctgccgccccgacgcccgcgcatccccgctcgccgcgcccgccgccgcgatgtccggggccggcctagccgcggtggtgagctgcctgcgcccgcagcccggcgaggagccgcagacccatgagacgttactatttttataaccactagacaacgcaggttgccgcatacttctttatttgtgtagacctcgctcttgccctgtttgaagagcctgagttgcttcccctgcctttcttggccacctcaatagcagaagtactctgcctgactgcatactttggcagactggtacattttgcaaaagtcactcctcaaatggttttctggaaggatacaaaagacatctgcaccatggtaaccacagtggcgagtgttcattgtagtacctgtaagagtttatgaccgaaggcaggagccatgaagaaaaaagactcaatagatttgcttttgatgaaacaacaacacttccatacagtgaacgccataagcacaactgcaagcaaaccgcaaactgaagaacaaatagggcaaaatgtggcagtgcagacatttcagcatatcaagagcacttccaaattacaggaaaaaaaagatatctcaatagataattttgctgaagataagtgaaggcaactcataaggaaaaaatatgtaaaatggccgataggaaagatgtttaacgtcactaattaaaaattatagaataaaacgacaataaaataccatgtgtttgcctata

SEQ ID NO: 40 - DNA, 2453 bp, Homo sapien
aagattaatattttgtgacacatggaagtgatatgaaatacaaattttgctgtctgcaaataatgttttatgggaacatagccacacttattaatttatgtgttgtctttggctgctttggagctacatcaacagtttagtggttgtgacagagactgtaagacttgcaaagcttcacatgtttactttaacagaaagagttcactaacccctagctttagagaacaacagccttttattatctcccatgactctgtgggacattggctcaggtggtgtggctggggtggtagatgtctggaagctcttagatctctggaggctggaacatcaaggtagctctctcacgtggctggcaggagctgctggctgtagctgtggccccggccctcttctatgtagctgctccacgtggcttaggcttttcccagtgggtggctgggtccaggaaggagcatcccagtgtgctgcaccatcaaacctctgcttgcatcatacttgctgatgtcctgttgtcaatcacatgccaaaacctgagtcaacttgggaggccactgcaaagggggtgaaaactgtaagtatggctcactggggctgcccaagtgacatccaccaactgtcttacaataaagatccggcaattaatgaattctctggatagaagacttttatcccaataacagtcaacacaaacacaaaatctgaagaaacagagctgtgcattcacaaacctggacagagtgttgtctatccctccttagcactggtccactctggccaaggtaggaatcccacagagtggtcttcttagccatttgcctcttttcctgagtcctcatcccctgtctgttattggtcatgtataactttgggttggctgcctgagtttcagagtgttccttcagccagcccttgtactgtaaatctccaaagtccagtgtgttctgagggctttggcccccatccagcattaccacgcaagtcttgttttaagcaaggatgtcctgaaattgcctaaggcccttttgcaaagctggacttgacattgggtctctatagctcttcaagagtcaacagactgagagctagaacatttgcaaggggctgcagcccagtctgtgcacagacccatgagggctggaactagggggcaatgatagtgtcccctgctgctttcaggcccacagccagccccttcctcctgtctctagctctcactcaagacttttccctctttttagcctaagtcaagttgtccctttctccatctcttcctatcttccacctgtctctccctattgatggaggaacgtgcccttgttaggaagttgttactgcatcccaacagcctcaggcatgggcttcaagtctagcaggtacaggagtctggagttggcacccgtaatctacagagggaggcccatcaggacttcggtcttgatctcagtgggctccatcctcgtctctaaccagcctcatataggcagcagggctgcagtggcagtgatgtttatggaaggacccattattcccaaacacatctttggggaattaccttaccgttagagaaatgggacttctaggtgtctggaatttgaacatggggaatttgagagcatagacgatctctgcctctgacctcccccttttctggggaaatgtgttcttggtcctcagcctgctggtgcagcccctcccaggaatccctgccagtgtgggtcatggagattgtgactcagtggcagatttccctttcagaggaagaagccattctaaccggcagaaaatgttgctgcaattttcagtaaaattaagggacatgacaaattctcagagggtgccaggcaggaaaggtagggtagtggcaggggacagggggtggtactggataactaaagctgagcctccccatggcaagccctcgtgctcagcctctgttttctccttgcaggccacctcaatagcagaagtactctgcctgactgcatactttggcagactggtacattttgcaaaagtcactcctcaaatggttttctggaaggatacaaaagacatctgcaccatggtaaccacagtggcgagtgttcattgtagtacctgtaagagtttatgaccgaaggcaggagccatgaagaaaaaagactcaatagatttgcttttgatgaaacaacaacacttccatacagtgaacgccataagcacaactgcaagcaaaccgcaaactgaagaacaaatagggcaaaatgtggcagtgcagacatttcagcatatcaagagcacttccaaattacaggaaaaaaaagatatctcaatagataattttgctgaagataagtgaaggcaactcataaggaaaaaatatgtaaaatggccgataggaaagatgtttaacgtcactaattaaaaattatagaataaaacgacaataaaataccatgtgtttgcctata

SEQ ID NO: 41 - DNA, 3426 bp, Homo sapien
taaagaggtaatccaagtaaaatgaggtccttagagcaggccctgatccaataggactgtccttattagaagaggaaacttggacacagatacacacagagggagcaccgtgtgaagacacagagaggagatggccagctaccagccaagcagagagcccttactgtaaaccaaccctgccgcatcctgatctcagaattttggcttccagaactgtaaggaaacacatttctactgtttaagccacttggctgggagtacttggttatggcagcctgagcagactaaaccagcacctcaaagagttgttatagggtatgcttagtggtaactggttcctaaaggccttgctttctaaggctgactcctcaccctgcaaggatgcattctccccactggcagatatgcaaccaggaacaggcattaacacgctttattcccagagttttaatattttccattgcataaaatatttgttcatgaaaatgacaaaattgctattagattctatcaccacatctctgttgattttactttctgcaaacacatacaagtaatgtaggcatacagttaaaaatgaaaccttatcctgtagttccagctactagggaggctgaagcaagagaatggcatgaacctgggaggcggagcttgtcgtgagcccagatcaggccactacactccagccggggcaacagagcgcaactccgtctcaaaacaaacaaacaaaacaaaacaaaaaaaacttatagacaagtacaaaatgagaagaaaaagtccctttcccttcatgcctctacttcctgctgtattctcaaaggtaagcactgattacagtttacttatggatctttccaggaaaatattttatgcatttatcagaaaatgtaagtatatgcatcctttaaaattctgcataaatcaaactctgcagggtactatcttcccatcctcatttgatattttgtagatcttttcctattggctgtacagatcacctcattctgtctcctgggtcatacaatatagctcacataattctaagtctgaaggttggtccaaatggttccaagaatgcaggtaccaaaaagtagtctcttgaagaggccatcagagacctggctgtttgtatcttcctcctctgccatccacagtgtcatcttcacccaaggtggctggagaagctgttaggaatatgtggttttttaaaaattacattcataggaaaaggggagggaagagaagaagaaaacctctccccctaagctcatggctctttttagtcaggctgagccaactaaagtcatgtacttcccttagataggtaactgttgccaggaaaatgccctgtgtggattggcctggactaagcaggatcctcctctaaagagagagatgagatgaatgcctgacccaagtctgggatcttgggtgggaagcgtgtggatagtaggtcagaggtcagcagtgtctgtggtgtaggatgtaatcccatctccacagagctgcatacaagtgtgtttaagtgtgtgcaagtgattaactttgattagtagtttcaactctttacaatgaacatatttatcttttttaaaaaataaagccattttaaaagatcttgccataaaacaatcattccttaagtcaccacttaggatagacctagaatatttgtcctttctcaagagcaccagagagttttctggtaatccacgcaataaacagttataaaaggtaattgttgagatcaggggaagatggcagataggaggcagtgctaatgtgtagctcccacatggatggacaaaacaccatgtggagactcacactgtgaccctgttgtgctccaagaactatcataggaacgtactgggaaaaccaaaagaattcacggatcctttgaaagaagacgcacaccactgtaaattctgtggaacaggagaaaaactgtcttggaggaaggcatccttctattctactgatcagaaagctggacaaagtcccactgccaggctacacagttggtgccatttgcggaggtgacctttgacctttaacccacgcggccacccgcccgagctcttacccctgctgcccctcgcgcgtcccactccccgtccctgccggatccgcttccctgcgctgggcccagcgcgccgccagggaaggggccggagcctgggagcccgccccgccgtcgcccgtcctccgcccgcaggcccacccgcagcggtcacgtgaaggaccgagcgccgcgcgcccaggcggggcctccggcctgcacgaggagggcagagtccgttgcggctgccgccccgacgcccgcgcatccccgctcgccgcgcccgccgccgcgatgtccggggccggcctagccgcggtggtgagctgcctgcgcccgcagcccggcgaggagccgcagacccatgaggaccttctcctggcagctgcctatgttttggatgcccagtacaacagaaatgttccatttgaaactcacctcaggccatcagacgttactatttttataaccactagacaacgcaggttgccgcatacttctttatttgtgtagacctcgctcttgccctgtttgaagagcctgagttgcttcccctgcctttcttggtaagcaagccatagcagatggctagccagatttggtcatagatgattgggccttgtgcctcttctttttttcccctcaaatttcaacaaatatgaattagatgttatttattttttttgctgggggattagagaagttctgtctactcaccaaacacatgcttccttcataacgcattttaagtgcagtgggagattttggtcttctgtgcacacacacacaaaatcagagatggttcaatgatgttttcaaagccaatttacttactgccaagtagatgatgttctcatatagtgtaatatgcaacttgtacatgccacattttcagctttttttcatagtcataaattattagagtatttattggtgcttaggggctgatcacatttgattttgagtaatgtatcaaattcaccagccaatccagagaggtctaaatagtagaccagtgccctgcccatgttgatttctgattcgtcattactcttacctctgtcttaatagctgtcatttgctccctgcttgctatctgctgggtgatctcatgctttctctgtattctccttaagccttacagggactcaatgggatgtgcctgctgttattatacccattttaacagataaggaagctgagcctagaaagattgtataacttgtccaaggttactaggcaacaaaggcagaactaggcttcaagcctaagcctgatttcaaagcttttgctttttaacaaccacacagacccttttttattcttccttatttcagttatcaattgcacaaacatatttacaa

SEQ ID NO: 42 - DNA, 3408 bp, Homo sapien
taaagaggtaatccaagtaaaatgaggtccttagagcaggccctgatccaataggactgtccttattagaagaggaaacttggacacagatacacacagagggagcaccgtgtgaagacacagagaggagatggccagctaccagccaagcagagagcccttactgtaaaccaaccctgccgcatcctgatctcagaattttggcttccagaactgtaaggaaacacatttctactgtttaagccacttggctgggagtacttggttatggcagcctgagcagactaaaccagcacctcaaagagttgttatagggtatgcttagtggtaactggttcctaaaggccttgctttctaaggctgactcctcaccctgcaaggatgcattctccccactggcagatatgcaaccaggaacaggcattaacacgctttattcccagagttttaatattttccattgcataaaatatttgttcatgaaaatgacaaaattgctattagattctatcaccacatctctgttgattttactttctgcaaacacatacaagtaatgtaggcatacagttaaaaatgaaaccttatcctgtagttccagctactagggaggctgaagcaagagaatggcatgaacctgggaggcggagcttgtcgtgagcccagatcaggccactacactccagccggggcaacagagcgcaactccgtctcaaaacaaacaaacaaaacaaaacaaaaaaaacttatagacaagtacaaaatgagaagaaaaagtccctttcccttcatgcctctacttcctgctgtattctcaaaggtaagcactgattacagtttacttatggatctttccaggaaaatattttatgcatttatcagaaaatgtaagtatatgcatcctttaaaattctgcataaatcaaactctgcagggtactatcttcccatcctcatttgatattttgtagatcttttcctattggctgtacagatcacctcattctgtctcctgggtcatacaatatagctcacataattctaagtctgaaggttggtccaaatggttccaagaatgcaggtaccaaaaagtagtctcttgaagaggccatcagagacctggctgtttgtatcttcctcctctgccatccacagtgtcatcttcacccaaggtggctggagaagctgttaggaatatgtggttttttaaaaattacattcataggaaaaggggagggaagagaagaagaaaacctctccccctaagctcatggctctttttagtcaggctgagccaactaaagtcatgtacttcccttagataggtaactgttgccaggaaaatgccctgtgtggattggcctggactaagcaggatcctcctctaaagagagagatgagatgaatgcctgacccaagtctgggatcttgggtgggaagcgtgtggatagtaggtcagaggtcagcagtgtctgtggtgtaggatgtaatcccatctccacagagctgcatacaagtgtgtttaagtgtgtgcaagtgattaactttgattagtagtttcaactctttacaatgaacatatttatcttttttaaaaaataaagccattttaaaagatcttgccataaaacaatcattccttaagtcaccacttaggatagacctagaatatttgtcctttctcaagagcaccagagagttttctggtaatccacgcaataaacagttataaaaggtaattgttgagatcaggggaagatggcagataggaggcagtgctaatgtgtagctcccacatggatggacaaaacaccatgtggagactcacactgtgaccctgttgtgctccaagaactatcataggaacgtactgggaaaaccaaaagaattcacggatcctttgaaagaagacgcacaccactgtaaattctgtggaacaggagaaaaactgtcttggaggaaggcatccttctattctactgatcagaaagctggacaaagtcccactgccaggctacacagttggtgccatttgcggaggtgacctttgacctttaacccacgcggccacccgcccgagctcttacccctgctgcccctcgcgcgtcccactccccgtccctgccggatccgcttccctgcgctgggcccagcgcgccgccagggaaggggccggagcctgggagcccgccccgccgtcgcccgtcctccgcccgcaggcccacccgcagcggtcacgtgaaggaccgagcgccgcgcgcccaggcggggcctccggcctgcacgaggagggcagagtccgttgcggctgccgccccgacgcccgcgcatccccgctcgccgcgcccgccgccgcgatgtccggggccggcctagccgcggtggtgagctgcctgcgcccgcagcccggcgaggagccgcagacccatgaggtaaggaggacttcctggctgtgctcggagggcgcccggacggcagcgcctcctgccccttcgttgccctcctggtgccgggcgcctccgggactcccagggagaaagcgaacccgctggaagccacggccggctgcagagaatgagggcccttgggggtcagcgggactaggaacccctctgctttcggtctttctcggttccctgctcattgggctgctcagctgggaggcgcaccgccagctagagcgcagcccgcacgttgtagtcaagcgacccgacaagcctcccactctccggggctgagcagggatcggtgctggggctccagattaggggccattctcactcagtgaggcgcgcacccttgtttggtgaccaatgcgcgtccccacagaactccaaggcagcaggaaaacgcccggaaagaaggctgcaggatgtgggccccgggagtgctgatgcagccccgggtcttccgatgcctgcgggacacagcagaagggctgcgcaggcgctcagggtctgtttcgctgcgatagcctgagcttcttcgaaagagtttgagcttccaagcgacccttcttgatctattttcttgcactggacaagaactaagacagtggagagggaggcaggacttcaatggcaggagcccctgctctgattcaggaaatctgaggcctgaattacaatatgatgggccgtcagaagtcatgaagaccatgggtgacaacgtcggtcaggccctggcacagtgcctggcacagtgcctggcacagtcatgacagccaatctttagacccctcagggtccatgctgcatctcctttgcgttgtgcaagtgtgtgggaggtggagagcgtttttgttcagtctccctcttagtcttgaactggcccccttcagctctgggctgctgcattatcacccctgccgcttcccactgggctcttgaagcctgctggagagggtcca

SEQ ID NO: 43 - DNA, 1923 bp, Homo sapien
cccgggtcttacaggagcagcctgtgggcaccgcggcggtagttggaggcgggagagggtccgtagccgcgccgccctgccccgccatgggcctcctgtcggacccggttcgccggcgcgcgctcgcccgcctagtgctgcgcctcaacgcgccgttgtgcgtgctgagctacgtggcgggcatcgcctggttcttggcgctggttttcccgccgctgacccagcgcacttacatgtcggagaacgccatgggctccaccatggtggaggagcagtttgcgggcggagaccgtgcccgggcttttgcccgggacttcgccgcccaccgcaagaagtcgggggctctgccagtggcctggcttgaacggacgatgcggtcagtagggctggaggtctacacgcagagtttctcccggaaactgcccttcccagatgagacccacgagcgctatatggtgtcgggcaccaacgtgtacggcatcctgcgggccccgcgtgctgccagcaccgagtcgcttgtgctcaccgtgccctgtggctctgactctaccaacagccaggctgtggggctgctgctggcactggctgcccacttccgggggcagatttattgggccaaagatatcgtcttcctggtaacagaacatgaccttctgggcactgaggcttggcttgaagcctaccacgatgtcaatgtcactggcatgcagtcgtctcccctgcagggccgagctggggccattcaggcagccgtggccctggagctgagcagtgatgtggtcaccagcctcgatgtggccgtggaggggcttaacgggcagctgcccaaccttgacctgctcaatctcttccagaccttctgccagaaagggggcctgttgtgcacgcttcagggccaaggtggggctgcctgcctgcctgagggctgaagggcacagggtctgtgggaggggctgtctcatcctgtcctgcacctcaagctgcagcccgaggactggacatcattggatggactgctgcagggcctgcagacactgctgctcatggttttgtggcaggcttcccgtggcctcttcctgcactaccatgtggaggccctaaccctgcgtcgcatcagtagcttccgccagtacaagtatgacctggtggcagcgggcaaggctttggagggcatgttctgcaagctcaaccacctcctggaacacccgcaccagctgttcttcctctacctgctccccactctgtcccgcttcgtctccatcggcctctacatgcccgccaccagcttcttgctcctggtccttggtttcaaggctctgcaactgtggatgcagctgcatgaggccggagtgggccttgaggagctcaggggggtccctgaccctagtgtcccccctcccccagcacaggatggtaagcacacaggtcccagacaggggctggatggctctgaagctggtagccctgatctacctagtactgcagctgggctgcatcgccctcaccaacttctgactggacttcctgctggccgccactatggtgctgccgctgtgctcgccgagcctttgggccctggaccctctgtgctgccctgctggtgttgacaagcccggcagccacgctccttggcagcccattcctgtggcgggagctgcaggaggcaccactgtcactggccaagggctggcagctcttcctggcagcactggcccagggtgcgctggagcaccacacctaaggcgccctgctcttcccactgctgtccctgggcctctgcccttgctgactacttttctggaatgtgctcttctggaagtgagatctgcctgtccggggcaccaggctgggacagagactccccaaggaccccattctgcctccttctggggaaataaacaagtgcctgtttcagctgcttta

SEQ ID NO: 44 - DNA, 1208 bp, Homo sapien
ttaggggctccgattcccaaagcaaccccatgggatatggttcagccctggcctaggagatggtaactggactctgcccatgtcctgtgtcctgggccagcccctcctctctctgggcctgggtttcccaagtgtctaatgaggggttggactggaactgcatatggaagtctcagtgtggacctgtctggctccctccatacctggtgggtgagtgggatgtgctctggggtaaccttgggcctccacatgagtgggcatgcgtgaaccttgaaggagatgcctgggcctcatgcccatggccacacatgcacacacggtctgcatgggccccaggcggcaggtgcaccagagccacactgcacagcacattgcatggcaccagtggttcctccagcgcgtgtcccacggttcctgtctcctgcaaccaggaagtaagccaaccttacttaaccacatggacttggaggaagggagtagttccccagggggaaactgagcctctgtgactattagaagtggccatggatgtgggaccggcgagagccccagatctttacagtcatgccggtcacctacacccctgcctcttgcaggagtgtgtgtcccagggaagggcaggactggtcccagctcacagagattcagggaaaagtgagtgcctcagctggggttagatttgtctacacaccaggatggtaagcacacaggtcccagacaggggctggatggctctgaagctggtagccctgatctacctagtactgcagctgggctgcatcgccctcaccaacttctgactggacttcctgctggccgccactatggtgctgccgctgtgctcgccgagcctttgggccctggaccctctgtgctgccctgctggtgttgacaagcccggcagccacgctccttggcagcccattcctgtggcgggagctgcaggaggcaccactgtcactggccaagggctggcagctcttcctggcagcactggcccagggtgcgctggagcaccacacctaaggcgccctgctcttcccactgctgtccctgggcctctgcccttgctgactacttttctggaatgtgctcttctggaagtgagatctgcctgtccggggcaccaggctgggacagagactccccaaggaccccattctgcctccttctggggaaataaacaagtgcctgtttcagctgcttta

SEQ ID NO: 45 - DNA, 641 bp, Homo sapien
caaactgaagaacaaataggaagtagcttgcagttgtacttatggcgttcactgtatggaagtgctgttgtttcatcaaaagcaaatctattgagtgaacgccataagcacaactgcaagcaaaccgcaaactgaagaacaaatagggcaaaatgtggcagtgcagacatttcagcatatcaagagcacttccaaattacaggaaaaaaaagatatctcaatagataattttgctgaagataagtgaaggcaactcataaggaaaaaatatgtaaaatggccgataggaaagatgtttaacgtcactaattaaaaattatagaataaaacgacaataaaataccatgtgtttgcctataaaacaatcttagcaagattgaaaacaaactttttgtaatttccaatttttagtttagattcaggtggtacatgtgcaggtttgttacatgggtatatttcgtgatggtgaggtttggggtacaactgatcccatcactcaggtagtgagcctagaatccagcaggtagtttttcaacccttcccctcctctgtcccttcccctcaggaatccccagtgtctactgttgccatctttgtgtccatgagtacccagtgtttagctcctacttataagtgacaac

SEQ ID NO: 46 - DNA, 1393 bp, Homo sapien
ttaggggctccgattcccaaagcaaccccatgggatatggttcagccctggcctaggagatggtaactggactctgcccatgtcctgtgtcctgggccagcccctcctctctctgggcctgggtttcccaagtgtctaatgaggggttggactggaactgcatatggaagtctcagtgtggacctgtctggctccctccatacctggtgggtgagtgggatgtgctctggggtaaccttgggcctccacatgagtgggcatgcgtgaaccttgaaggagatgcctgggcctcatgcccatggccacacatgcacacacggtctgcatgggccccaggcggcaggtgcaccagagccacactgcacagcacattgcatggcaccagtggttcctccagcgcgtgtcccacggttcctgtctcctgcaaccaggaagtaagccaaccttacttaaccacatggacttggaggaagggagtagttccccagggggaaactgagcctctgtgactattagaagtggccatggatgtgggaccggcgagagccccagatctttacagtcatgccggtcacctacacccctgcctcttgcaggagtgtgtgtcccagggaagggcaggactggtcccagctcacagagattcagggaaaagtgagtgcctcagctggggttagatttgtctacacacagcagaaagttcagaacagttgtggcacagacaagagagagcgctttctttctcctgttaaagaactctggaggtggctgtccatgctgacccgggctgtccccatagccatcagccagcacctgtcctgctgtcccagagtctcagtagctgacttctgtcctcaatgctgtctctggaccccagagggctgtgcttcagagataggaagaggagagaaggaaggaccaagacctgctcagctgtgtgagttccaggcagacagcctctgcgagcccctcacagtgcctctgctcatgcccagttagcttggacttgttctggtcaccttagctacaaggtaggttagtcaggagcggtagccttttcgcttggcaagttgttgccgaggataaaaccgagccctctgttcttaagaaacagggaagtatgaaaatcccgggtgaagaccagcgttgtctccctgcactgaactgcaagatgaaggggaggaactgagttacccttagataaattgggaatttatttgtctaaaacagactctcttttcttggtatgtattcattgaagagagagaaaaagtcatggctctcagccaggatatgtgagtaggaaggctgctttcagtgcctaagcaggatgataggaagtgatgtgttggcttccacctgactgtaatttgtaaggagctctgagaaaatc

SEQ ID NO: 47 - DNA, 1122 bp, Homo sapien
ataaaaaataaagtggatgagttagaattgggtttctatcctttatttttataaaatggatcaaggttttaacatgtctgaataaaatttgccatggacagctgcccaaccttgacctgctcaatctcttccagaccttctgccagaaagggggcctgttgtgcacgcttcagggcaagctgcagcccgaggactggacatcattggatggactgctgcagggcctgcagacactgctgctcatggttttgtggcaggcttcccgtggcctcttcctgcactaccatgtggaggccctaaccctgcgtcgcatcagtagcttccgccagtacaagtatgacctggtggcagcgggcaaggctttggagggcatgttctgcaagctcaaccacctcctggaacacccgcaccagctgttcttcctctacctgctccccactctgtcccgcttcgtctccatcggcctctacatgcccgccaccagcttcttgctcctggtccttggtttcaaggctctgcaactgtggatgcagctgcatgaggccggagtgggccttgaggagctcaggggggtccctgaccctagtgtcccccctcccccagcacaggatggtaagcacacaggtcccagacaggggctggatggctctgaagctggtagccctgatctacctagtactgcagctgggctgcatcgccctcaccaacttctgactggacttcctgctggccgccactatggtgctgccgctgtgctcgccgagcctttgggccctggaccctctgtgctgccctgctggtgttgacaagcccggcagccacgctccttggcagcccattcctgtggcgggagctgcaggaggcaccactgtcactggccaagggctggcagctcttcctggcagcactggcccagggtgcgctggagcaccacacctaaggcgccctgctcttcccactgctgtccctgggcctctgcccttgctgactacttttctggaatgtgctcttctggaagtgagatctgcctgtccggggcaccaggctgggacagagactccccaaggaccccattctgcctccttctggggaaataaacaagtgcctgtttcagctgcttta

SEQ ID NO: 48 - DNA, 485 bp, Homo sapien
agagtgagctggtaccgatattgaagagtgtggacaggtatgatatcatcacggtgcttggttttaaagtaaatgtttttctaaagaaagctgtgttcttctgttgacccagacgaatagggcacagccctgtaactgcacgtgccttctgtcattgggaatgaaataaattattacgagaaagggacttgtcctaactggtttgaggccttacagttttgtatctacatttttcccctcctggggtttgcggggacagggacagaactacaggagtcatgggaaagaaaattctggcttcactactgctcactgctcactttctgatcactctgatacttttttttttttttttttttgcaacctgataccttgaaaagcttctatgtgtctctccttttgttgcctggcagctgtctaggatgatcactgattactatttactaagtagccacatgcaaataaaagttgtttggtaaaatgga

SEQ ID NO: 49 - DNA, 606 bp, Homo sapien
  misc_feature (166)..(189): n=a,c,g or t
  misc_feature (582)..(582): n=a,c,g or t
aatccacctctccgcctgtgcaacacacactttacacacgcacggggactgcaagcgggcagcatcgatcgtggctcctttaagacaaactcagacagacattttttttaaccctccttctctaatctccttccagtgcagcacttgcaaagagggagagagaggnnnnnnnnnnnnnnnnnnnnnnnnagagagaaactgattaggaattaggactgattcaagggaagcgagcgctagggctttgtgcatttgaatattaacatttgaggtgttctgaccagaagaagacagagcggatgatcattcattcaccacgttgacaacctcgcctgtgattgacagctggagtggcagaaagccatgagatttggtagttgggtctgaggggcgctcttttttttccttttcttgctgtctttctttggttttttttaaactgatttttgggggagagaagatctgcttttttttgcccccgctgctgtcttggaaacggagcgcttttatgctcagtgactcgggcgctttgcttcaggtcccgtagaccgaaggatctgggaccagtagcatcacgtggcntgggagacggttaaggggatgttt

SEQ ID NO: 50 - DNA, 1168 bp, Homo sapien
aaactttgcaatgggaaaagccacagtttgagggccatttggaatatttttctgtccactccttccaaggacacatgtagtccagtgttgtggcccttttggggtggggtggggccagtgggactgagaaaggggagagccatgggggaggagggtgtttatgatcctcacttagatgctgtgttgttgttttagctagttttttttttcttaagaaatataaacctctagatggtacccagttgctgctattaagttttagtgttattgccataaatcaaaataactctatttactggtgggagggggtgggctggagatggtagagctgtggcagccagttttctgcaagccaggaatggggtgcttattgtttttgtatctttgcagatgattcaagccatacaagtattaaggtttcatctattggaattagagaaggtaatttctctagcctcttttccttttacttaccccttacccccaaacacacaggggggagggttccgaatggctgaagttcagccttctgatacatttgcataaatgtctttctttctggtaattagtgtcaaggccaatcttagcgtccatttctcttcgcagtttaattacaatttcagccactaaaactgggatcacaaacgccctagccttgtgttcattcttaataacttgctggctttgtgtaaatagttgcaattctgtgcatcccagctgatgtttcgaatgctgctctgaggttgtttcacaagttcatacctctgttgtctcttctcatcctcttccttctcttctttgctacctctgagggagaaaaaagttttattcagttgtagtgagtttctggaagacagtcttgagagcaagggcagatcagacacaggggagaggcagaaggggagaaggaggaggagcgggaaggagtctggaggaggtggtggggaggcacattaaacgttttgcagagacaaagcagagttgatagttgtgtcaatttcttgaatctgtgaatcctgcacacactccaccttcacactcaagaaagggtgtgggataacatgattttgctagctgttctataaatctcagcaataaaaacttaatgcattgtaattcaaactaacattaaattgcaagcacactggggtttcttgtgaatttttgc

SEQ ID NO: 51 - DNA, 1117 bp, Homo sapien
ctctcccctcccctcgggcgtggggggcagtgtgtgactgttctttactccaggctggtgattcaggaggcagccttgtttgtgtttccgtatgcctcctgcaggggagacttgcttttctttgatacataaatggtgagtgaaaagtaactctcctgtgagcttggtctcttttttgctcttctctggtcgagcagcctgaccaggcctggtcagtgtgaattgcccaatttcatagtgtgcacgggggtctcaggagagggcaattgcctcataacttttctattagcagaatttcagattcctgacgtggagcgatacttgaaaaccatttgtgtgatgctgggaaatgtttgctttgtccttctttatgtcctaggcatgggcatttttgtcatttcactggggactacttgtaggctctgaaagcaggaaggggcttctctcaggccatgccctagctaagcgaggattcccctctgtatttggatagctggttgctcaagttccaacccttacatgaggtttttctgtatgattttctcctttatgttttggaggcacactcgggaacgttctcgtttttttttgtttgttttgcaatgtggctatttttgactttacaaagcattggaactggcatcctcccattcttgtgaactttctctggatctgtaaatacttggtatttgttttctttcttgtacatttcaggggtggtttttatatttaactttgactaagatacactcacatgctactctgagagtacatgcttcggtgtctcttttttctttgccttcagtaaaaaggataagattcagggaaggtttatgaactcactttatgggtcagacatgtgctggctgtggagagcatacagcaataagaaaggactgtctctaccctcagatacctttctagaggttaaagaaatgcaccttgatcattatcattgtctctaatggagtaaatggaaagggtagtggtagaatggttaggagtttagcctcaagtcagatctgggttgaatccacaaggatttgtattccttatctgtatagcagcctatttccttatctgtgcattagggacattcaaaggattaaatgagata

SEQ ID NO: 52 - DNA, 502 bp, Homo sapien
caaagagtgaaatattgtcttatatagttatttagcatgtcccccaaaatgactgtggagttccattcttggcatctactctggaccaaggagcatccctaattcttcatagggacctttaaaaagcaggaaataccaactgaagtcaatttgggggacatgctaaataactatataagacattaagagaacaaagagtgaaatattgtaaatgctattatactgttatccatattacgttgtttcttatagatttactaagtgggataagctaattatactttttgttgtggataaacaaatgcttgttgatagcctttttctatcaagaaaccaaggagctaattattaataacaatcattgcacactgagtcttagcgtttctgatggaaacagtttggattgtataataacgccaagcccagttgtagtcgtttgagtgcagtaatgaaatctgaatctaaaataaaaacaagattatttttgtcatgctgactccac

SEQ ID NO: 53 - DNA, 2826 bp, Homo sapien
tccgggggagtttgaatatttgtttcttttcacactggccttaaagaggatatattagaagttgaagtaggaagggagccagagaggccgatggcgcaaaggtacgacgatctaccccattacgggggcatggatggagtaggcatcccctccacgatgtatggggacccgcatgcagccaggtccatgcagccggtccaccacctgaaccacgggcctcctctgcactcgcatcagtacccgcacacagctcataccaacgccatggcccccagcatgggctcctctgtcaatgacgctttaaagagagataaagatgccatttatggacaccccctcttccctctcttagcactgatttttgagaaatgtgaattagctacttgtaccccccgcgagccgggggtggcgggcggggacgtctgctcgtcagagtcattcaatgaagatatagccgtgttcgccaaacagattcgcgcagaaaaacctctattttcttctaatccagaactggataacttgatgattcaagccatacaagtattaaggtttcatctattggaattagagaaggtacacgaattatgtgacaatttctgccaccggtatattagctgtttgaaagggaaaatgcctatcgatttggtgatagacgatagagaaggaggatcaaaatcagacagtgaagatataacaagatcagcaaatctaactgaccagccctcttggaacagagatcatgatgacacggcatctactcgttcaggaggaaccccaggcccttccagcggtggccacacgtcacacagtggggacaacagcagtgagcaaggtgatggcttggacaacagtgtagcttcccccagcacaggtgacgatgatgaccctgataaggacaaaaagcgtcacaaaaagcgtggcatctttcccaaagtagccacaaatatcatgagggcgtggctgttccagcatctaacacacccttacccttctgaagaacagaaaaagcagttggcacaagacacgggactcaccatccttcaagtgaacaattggtttattaatgcccggagaagaatagtgcagcccatgatagaccagtccaaccgagcagtaagtcaaggaacaccttataatcctgatggacagcccatgggaggtttcgtaatggacggtcagcaacatatgggaattagagcaccaggacctatgagtggaatgggcatgaatatgggcatggaggggcagtggcactacatgtaaccttcatctagttaaccaatcgcaaagcaagggggaaggctgcaaagtatgccaggggagtatgtagcccggggtggtccaatgggtgtgagtatgggacagccaagttatacccaaccccagatgcccccccatcctgctcagctgcgtcatgggccccccatgcatacgtacattcctggacaccctcaccacccaacagtgatgatgcatggaggaccgccccaccctggaatgccaatgtcagcatcaagccccacagttcttaatacaggagacccaacaatgagtggacaagtcatggacattcatgctcagtagcttaagggaatatgcattgtctgcaatggtgactgatttcaaatcatgttttttctgcaatgactgtggagttccattcttggcatctactctggaccaaggagcatccctaattcttcatagggacctttaaaaagcaggaaataccaactgaagtcaatttgggggacatgctaaataactatataagacattaagagaacaaagagtgaaatattgtaaatgctattatactgttatccatattacgttgtttcttatagattttttaaaaaaaatgtgaaatttttccacactatgtgtgttgtttccatagctcttcacttcctccagaagcctccttacattaaaaagccttacagttatcctgcaagggacaggaaggtctgatttgcaggatttttagagcattaaaataactatcaggcagaagaatctttcttctcgcctaggatttcagccatgcgcgcgctctctctctttctctctcttttcctctctctccctctttctagcctggggcttgaatttgcatgtctaattcatttactcaccatatttgaattggcctgaacagatgtaaatcgggaaggatgggaaaaactgcagtcatcaacaatgattaatcagctgttgcaggcagtgtcttaaggagactggtaggaggaggcatggaaaccaaaaggccgtgtgtttagaagcctaattgtcacatcaagcatcattgtccccatgcaacaaccaccaccttatacatcacttcctgttttaagcagctctaaaacatagactgaagatttatttttaatatgttgactttatttctgagcaaagcatcggtcatgtgtgtattttttcatagtcccaccttggagcatttatgtagacattgtaaataaattttgtgcaaaaaggactggaaaaatgaactgtattattgcaatttttttttgtaaaagtagcagtttggtatgagttggcatgcatacaagatttactaagtgggataagctaattatactttttgttgtggataaacaaatgcttgttgatagcctttttctatcaagaaaccaaggagctaattattaataacaatcattgcacactgagtcttagcgtttctgatggaaacagtttggattgtataataacgccaagcccagttgtagtcgtttgagtgcagtaatgaaatctgaatctaaaataaaaacaagattatttttgtcatgctgactccac

SEQ ID NO: 54 - DNA, 4438 bp, Homo sapien
tccgggggagtttgaatatttgtttcttttcacactggccttaaagaggatatattagaagttgaagtaggaagggagccagagaggccgatggcgcaaaggtacgacgatctaccccattacgggggcatggatggagtaggcatcccctccacgatgtatggggacccgcatgcagccaggtccatgcagccggtccaccacctgaaccacgggcctcctctgcactcgcatcagtacccgcacacagctcataccaacgccatggcccccagcatgggctcctctgtcaatgacgctttaaagagagataaagatgccatttatgggtaggtacaatgggcagcaggttaagtagttgagactcaacgcttccctccttctctgtgcccttggtaagaggaaagtcagagttctctggattggaggtacatctttggtgacttttcattcacatttcatggataatttggggaggtggcctgccatccctgaagccctacatccccatacacactctgtgcacatccagtgccctgctccaccatggcagtgcccgcaagggggtcccagatgagaagaagctggctaaagggcccttgtcccctctcagactccttcagcgggctggagtcctccctcgctcgatttcgcccgagagcgttaggggtttctaaatgcaggcgcctttgtgttgtaacgaaacttttagtttaagggaaaatctcttttaagccactgattgttctgacttgctgagtttactcagcagccttatgctggctctgccactgcacaataaaaccaaagcaggacagttgcaggtcaagcaagggggaacatgttttgcatttagggagtttgaccactgaagtcaaggagaggagcttgctctgaattgttacacacattaagaaacttctagatgttttagcactttgtgctcaaaggcgaaacctgcaggatttagaaataagtaaattcggggtgctcttcctcggaggttgttttctggctgcggtttatactgctttctcctccgccattcgattagaccctgggctagtagaatcctttgaaactcacttgtgcctactgtgtgccgatgaatttgggaacctctttttactttgcagaaacttttatttctatttatttatttttaaaaaatcaggacacactgaccctccctcgctggaaaaaaaaatatatataatctttttattttattttctgatcccttgtgcgatgggcttgtttaattcccaccgttctgtccgcagagttaactacaagtggtttaggctctgggacagaacatttggggaagctttgtaaaggaccccaaactgttaaattcccagctgagctgtgagagctaataaaagacttgagatacctccttgggcattagaagaagcttttctttctttcttcttcttcttcttttttttttttttttcttttttatgggctgagacaagcgacatctaggcccctcgcaatactagctgctttgccacttcgcagagacaaaatgaaaggctctactgcaggaacatttgaaggaactttctttggggggcggtgggggctatcagcgaagggaggggaatgtgcgtggagctgaggaggagcctcccggctctccgagggccttggggttgggatccctaggtgcagcccgttgacagtcggccccacggccatggacgtcctttccccaagttagctgagcgcctgccaccgagatcccccgagcctgggcttcgcgcggccgcctaggaggaacccgcaggaaccagccctccccaactctccgcccggcgcctttctcctccaccggatcctggatgtgcagtggaggggacgagggcttgtcgggtgggaaacttaattcaaaatggctgctggaaacgcttgggttttattcgtagcaaatgttgccaatttctccggccagatacgctaaaccgatcctcagataccgtccatggctcagggcctccgacttcagggctccaggaggaaggggagacaccccctcttccctctcttagcactgatttttgagaaatgtgaattagctacttgtaccccccgcgagccgggggtggcgggcggggacgtctgctcgtcagagtcattcaatgaagatatagccgtgttcgccaaacagattcgcgcagaaaaacctctattttcttctaatccagaactggataacttgatgattcaagccatacaagtattaaggtttcatctattggaattagagaaggtacacgaattatgtgacaatttctgccaccggtatattagctgtttgaaagggaaaatgcctatcgatttggtgatagacgatagagaaggaggatcaaaatcagacagtgaagatataacaagatcagcaaatctaactgaccagccctcttggaacagagatcatgatgacacggcatctactcgttcaggaggaaccccaggcccttccagcggtggccacacgtcacacagtggggacaacagcagtgagcaaggtgatggcttggacaacagtgtagcttcccccagcacaggtgacgatgatgaccctgataaggacaaaaagcgtcacaaaaagcgtggcatctttcccaaagtagccacaaatatcatgagggcgtggctgttccagcatctaacacacccttacccttctgaagaacagaaaaagcagttggcacaagacacgggactcaccatccttcaagtgaacaattggtttattaatgcccggagaagaatagtgcagcccatgatagaccagtccaaccgagcagtaagtcaaggaacaccttataatcctgatggacagcccatgggaggtttcgtaatggacggtcagcaacatatgggaattagagcaccagggctgcaaagtatgccaggggagtatgtagcccggggtggtccaatgggtgtgagtatgggacagccaagttatacccaaccccagatgcccccccatcctgctcagctgcgtcatgggccccccatgcatacgtacattcctggacaccctcaccacccaacagtgatgatgcatggaggaccgccccaccctggaatgccaatgtcagcatcaagccccacagttcttaatacaggagacccaacaatgagtggacaagtcatggacattcatgctcagtagcttaagggaatatgcattgtctgcaatggtgactgatttcaaatcatgttttttctgcaatgactgtggagttccattcttggcatctactctggaccaaggagcatccctaattcttcatagggacctttaaaaagcaggaaataccaactgaagtcaatttgggggacatgctaaataactatataagacattaagagaacaaagagtgaaatattgtaaatgctattatactgttatccatattacgttgtttcttatagattttttaaaaaaaatgtgaaatttttccacactatgtgtgttgtttccatagctcttcacttcctccagaagcctccttacattaaaaagccttacagttatcctgcaagggacaggaaggtctgatttgcaggatttttagagcattaaaataactatcaggcagaagaatctttcttctcgcctaggatttcagccatgcgcgcgctctctctctttctctctcttttcctctctctccctctttctagcctggggcttgaatttgcatgtctaattcatttactcaccatatttgaattggcctgaacagatgtaaatcgggaaggatgggaaaaactgcagtcatcaacaatgattaatcagctgttgcaggcagtgtcttaaggagactggtaggaggaggcatggaaaccaaaaggccgtgtgtttagaagcctaattgtcacatcaagcatcattgtccccatgcaacaaccaccaccttatacatcacttcctgttttaagcagctctaaaacatagactgaagatttatttttaatatgttgactttatttctgagcaaagcatcggtcatgtgtgtattttttcatagtcccaccttggagcatttatgtagacattgtaaataaattttgtgcaaaaaggactggaaaaatgaactgtattattgcaatttttttttgtaaaagtagcagtttggtatgagttggcatgcatacaagatttactaagtgggataagctaattatactttttgttgtggataaacaaatgcttgttgatagcctttttctatcaagaaaccaaggagctaattattaataacaatcattgcacactgagtcttagcgtttctgatggaaacagtttggattgtataataacgccaagcccagttgtagtcgtttgagtgcagtaatgaaatctgaatctaaaataaaaacaagattatttttgtcatgctgactccac

SEQ ID NO: 55 - DNA, 3068 bp, Homo sapien
gagacatgcccgtttcaccttctaccctcgggagaatgcttctctttctctctttctttcttctttccttcttgccaaaggagcctgaatttctaaactagttgatagggacacaagttagggcaagatcattcatcccagacgagtctcgctgagaattctgtattttttacttaaagctttaattttaaaataagaaaaactcagctttatagatgcaaggccaccgaattccgggtggaaggacccagctgtattgaccttatataagctcggtgccttgccgttctcccatttgcccgcctggcctcctgaaccttctttctctcctgtttgtcatgcagtacgacgatctaccccattacgggggcatggatggagtaggcatcccctccacgatgtatggggacccgcatgcagccaggtccatgcagccggtccaccacctgaaccacgggcctcctctgcactcgcatcagtacccgcacacagctcataccaacgccatggcccccagcatgggctcctctgtcaatgacgctttaaagagagataaagatgccatttatggacaccccctcttccctctcttagcactgatttttgagaaatgtgaattagctacttgtaccccccgcgagccgggggtggcgggcggggacgtctgctcgtcagagtcattcaatgaagatatagccgtgttcgccaaacagattcgcgcagaaaaacctctattttcttctaatccagaactggataacttgatgattcaagccatacaagtattaaggtttcatctattggaattagagaaggtacacgaattatgtgacaatttctgccaccggtatattagctgtttgaaagggaaaatgcctatcgatttggtgatagacgatagagaaggaggatcaaaatcagacagtgaagatataacaagatcagcaaatctaactgaccagccctcttggaacagagatcatgatgacacggcatctactcgttcaggaggaaccccaggcccttccagcggtggccacacgtcacacagtggggacaacagcagtgagcaaggtgatggcttggacaacagtgtagcttcccccagcacaggtgacgatgatgaccctgataaggacaaaaagcgtcacaaaaagcgtggcatctttcccaaagtagccacaaatatcatgagggcgtggctgttccagcatctaacacacccttacccttctgaagaacagaaaaagcagttggcacaagacacgggactcaccatccttcaagtgaacaattggtttattaatgcccggagaagaatagtgcagcccatgatagaccagtccaaccgagcagtaagtcaaggaacaccttataatcctgatggacagcccatgggaggtttcgtaatggacggtcagcaacatatgggaattagagcaccaggacctatgagtggaatgggcatgaatatgggcatggaggggcagtggcactacatgtaaccttcatctagttaaccaatcgcaaagcaagggggaaggctgcaaagtatgccaggggagtatgtagcccggggtggtccaatgggtgtgagtatgggacagccaagttatacccaaccccagatgcccccccatcctgctcagctgcgtcatgggccccccatgcatacgtacattcctggacaccctcaccacccaacagtgatgatgcatggaggaccgccccaccctggaatgccaatgtcagcatcaagccccacagttcttaatacaggagacccaacaatgagtggacaagtcatggacattcatgctcagtagcttaagggaatatgcattgtctgcaatggtgactgatttcaaatcatgttttttctgcaatgactgtggagttccattcttggcatctactctggaccaaggagcatccctaattcttcatagggacctttaaaaagcaggaaataccaactgaagtcaatttgggggacatgctaaataactatataagacattaagagaacaaagagtgaaatattgtaaatgctattatactgttatccatattacgttgtttcttatagattttttaaaaaaaatgtgaaatttttccacactatgtgtgttgtttccatagctcttcacttcctccagaagcctccttacattaaaaagccttacagttatcctgcaagggacaggaaggtctgatttgcaggatttttagagcattaaaataactatcaggcagaagaatctttcttctcgcctaggatttcagccatgcgcgcgctctctctctttctctctcttttcctctctctccctctttctagcctggggcttgaatttgcatgtctaattcatttactcaccatatttgaattggcctgaacagatgtaaatcgggaaggatgggaaaaactgcagtcatcaacaatgattaatcagctgttgcaggcagtgtcttaaggagactggtaggaggaggcatggaaaccaaaaggccgtgtgtttagaagcctaattgtcacatcaagcatcattgtccccatgcaacaaccaccaccttatacatcacttcctgttttaagcagctctaaaacatagactgaagatttatttttaatatgttgactttatttctgagcaaagcatcggtcatgtgtgtattttttcatagtcccaccttggagcatttatgtagacattgtaaataaattttgtgcaaaaaggactggaaaaatgaactgtattattgcaatttttttttgtaaaagtagcagtttggtatgagttggcatgcatacaagatttactaagtgggataagctaattatactttttgttgtggataaacaaatgcttgttgatagcctttttctatcaagaaaccaaggagctaattattaataacaatcattgcacactgagtcttagcgtttctgatggaaacagtttggattgtataataacgccaagcccagttgtagtcgtttgagtgcagtaatgaaatctgaatctaaaataaaaacaagattatttttgtcatgctgactccac

SEQ ID NO: 56 - DNA, 2874 bp, Homo sapien
tccgggggagtttgaatatttgtttcttttcacactggccttaaagaggatatattagaagttgaagtaggaagggagccagagaggccgatggcgcaaaggaggaagatggaaagttgtgcatttgcttttgaatttgctttaaacctgtacgacgatctaccccattacgggggcatggatggagtaggcatcccctccacgatgtatggggacccgcatgcagccaggtccatgcagccggtccaccacctgaaccacgggcctcctctgcactcgcatcagtacccgcacacagctcataccaacgccatggcccccagcatgggctcctctgtcaatgacgctttaaagagagataaagatgccatttatggacaccccctcttccctctcttagcactgatttttgagaaatgtgaattagctacttgtaccccccgcgagccgggggtggcgggcggggacgtctgctcgtcagagtcattcaatgaagatatagccgtgttcgccaaacagattcgcgcagaaaaacctctattttcttctaatccagaactggataacttgatgattcaagccatacaagtattaaggtttcatctattggaattagagaaggtacacgaattatgtgacaatttctgccaccggtatattagctgtttgaaagggaaaatgcctatcgatttggtgatagacgatagagaaggaggatcaaaatcagacagtgaagatataacaagatcagcaaatctaactgaccagccctcttggaacagagatcatgatgacacggcatctactcgttcaggaggaaccccaggcccttccagcggtggccacacgtcacacagtggggacaacagcagtgagcaaggtgatggcttggacaacagtgtagcttcccccagcacaggtgacgatgatgaccctgataaggacaaaaagcgtcacaaaaagcgtggcatctttcccaaagtagccacaaatatcatgagggcgtggctgttccagcatctaacacacccttacccttctgaagaacagaaaaagcagttggcacaagacacgggactcaccatccttcaagtgaacaattggtttattaatgcccggagaagaatagtgcagcccatgatagaccagtccaaccgagcagtaagtcaaggaacaccttataatcctgatggacagcccatgggaggtttcgtaatggacggtcagcaacatatgggaattagagcaccaggacctatgagtggaatgggcatgaatatgggcatggaggggcagtggcactacatgtaaccttcatctagttaaccaatcgcaaagcaagggggaaggctgcaaagtatgccaggggagtatgtagcccggggtggtccaatgggtgtgagtatgggacagccaagttatacccaaccccagatgcccccccatcctgctcagctgcgtcatgggccccccatgcatacgtacattcctggacaccctcaccacccaacagtgatgatgcatggaggaccgccccaccctggaatgccaatgtcagcatcaagccccacagttcttaatacaggagacccaacaatgagtggacaagtcatggacattcatgctcagtagcttaagggaatatgcattgtctgcaatggtgactgatttcaaatcatgttttttctgcaatgactgtggagttccattcttggcatctactctggaccaaggagcatccctaattcttcatagggacctttaaaaagcaggaaataccaactgaagtcaatttgggggacatgctaaataactatataagacattaagagaacaaagagtgaaatattgtaaatgctattatactgttatccatattacgttgtttcttatagattttttaaaaaaaatgtgaaatttttccacactatgtgtgttgtttccatagctcttcacttcctccagaagcctccttacattaaaaagccttacagttatcctgcaagggacaggaaggtctgatttgcaggatttttagagcattaaaataactatcaggcagaagaatctttcttctcgcctaggatttcagccatgcgcgcgctctctctctttctctctcttttcctctctctccctctttctagcctggggcttgaatttgcatgtctaattcatttactcaccatatttgaattggcctgaacagatgtaaatcgggaaggatgggaaaaactgcagtcatcaacaatgattaatcagctgttgcaggcagtgtcttaaggagactggtaggaggaggcatggaaaccaaaaggccgtgtgtttagaagcctaattgtcacatcaagcatcattgtccccatgcaacaaccaccaccttatacatcacttcctgttttaagcagctctaaaacatagactgaagatttatttttaatatgttgactttatttctgagcaaagcatcggtcatgtgtgtattttttcatagtcccaccttggagcatttatgtagacattgtaaataaattttgtgcaaaaaggactggaaaaatgaactgtattattgcaatttttttttgtaaaagtagcagtttggtatgagttggcatgcatacaagatttactaagtgggataagctaattatactttttgttgtggataaacaaatgcttgttgatagcctttttctatcaagaaaccaaggagctaattattaataacaatcattgcacactgagtcttagcgtttctgatggaaacagtttggattgtataataacgccaagcccagttgtagtcgtttgagtgcagtaatgaaatctgaatctaaaataaaaacaagattatttttgtcatgctgactccac

SEQ ID NO: 57 - DNA, 2435 bp, Homo sapien
cagcgcggggatttatctcccggcctgtcagcatgtgtgcttaaactttgcggacttcctagccctctaagtcccatcacgagggcagccaccggacaagagcccccaaacaaccagtttgcctgaaaggtatgattcaagccatacaagtattaaggtttcatctattggaattagagaaggtacacgaattatgtgacaatttctgccaccggtatattagctgtttgaaagggaaaatgcctatcgatttggtgatagacgatagagaaggaggatcaaaatcagacagtgaagatataacaagatcagcaaatctaactgaccagccctcttggaacagagatcatgatgacacggcatctactcgttcaggaggaaccccaggcccttccagcggtggccacacgtcacacagtggggacaacagcagtgagcaaggtgatggcttggacaacagtgtagcttcccccagcacaggtgacgatgatgaccctgataaggacaaaaagcgtcacaaaaagcgtggcatctttcccaaagtagccacaaatatcatgagggcgtggctgttccagcatctaacacacccttacccttctgaagaacagaaaaagcagttggcacaagacacgggactcaccatccttcaagtgaacaattggtttattaatgcccggagaagaatagtgcagcccatgatagaccagtccaaccgagcagtaagtcaaggaacaccttataatcctgatggacagcccatgggaggtttcgtaatggacggtcagcaacatatgggaattagagcaccaggacctatgagtggaatgggcatgaatatgggcatggaggggcagtggcactacatgtaaccttcatctagttaaccaatcgcaaagcaagggggaaggctgcaaagtatgccaggggagtatgtagcccggggtggtccaatgggtgtgagtatgggacagccaagttatacccaaccccagatgcccccccatcctgctcagctgcgtcatgggccccccatgcatacgtacattcctggacaccctcaccacccaacagtgatgatgcatggaggaccgccccaccctggaatgccaatgtcagcatcaagccccacagttcttaatacaggagacccaacaatgagtggacaagtcatggacattcatgctcagtagcttaagggaatatgcattgtctgcaatggtgactgatttcaaatcatgttttttctgcaatgactgtggagttccattcttggcatctactctggaccaaggagcatccctaattcttcatagggacctttaaaaagcaggaaataccaactgaagtcaatttgggggacatgctaaataactatataagacattaagagaacaaagagtgaaatattgtaaatgctattatactgttatccatattacgttgtttcttatagattttttaaaaaaaatgtgaaatttttccacactatgtgtgttgtttccatagctcttcacttcctccagaagcctccttacattaaaaagccttacagttatcctgcaagggacaggaaggtctgatttgcaggatttttagagcattaaaataactatcaggcagaagaatctttcttctcgcctaggatttcagccatgcgcgcgctctctctctttctctctcttttcctctctctccctctttctagcctggggcttgaatttgcatgtctaattcatttactcaccatatttgaattggcctgaacagatgtaaatcgggaaggatgggaaaaactgcagtcatcaacaatgattaatcagctgttgcaggcagtgtcttaaggagactggtaggaggaggcatggaaaccaaaaggccgtgtgtttagaagcctaattgtcacatcaagcatcattgtccccatgcaacaaccaccaccttatacatcacttcctgttttaagcagctctaaaacatagactgaagatttatttttaatatgttgactttatttctgagcaaagcatcggtcatgtgtgtattttttcatagtcccaccttggagcatttatgtagacattgtaaataaattttgtgcaaaaaggactggaaaaatgaactgtattattgcaatttttttttgtaaaagtagcagtttggtatgagttggcatgcatacaagatttactaagtgggataagctaattatactttttgttgtggataaacaaatgcttgttgatagcctttttctatcaagaaaccaaggagctaattattaataacaatcattgcacactgagtcttagcgtttctgatggaaacagtttggattgtataataacgccaagcccagttgtagtcgtttgagtgcagtaatgaaatctgaatctaaaataaaaacaagattatttttgtcatgctgactccac

SEQ ID NO: 58 - DNA, 2054 bp, Homo sapien
tcaaaatcattataaggtggacagtgttttgtgaagattttcttttccccagctctaagaaaccatgtggaaagaattcattgataactgttttgatttttttctttttttaagtacaggttttgctaagtaatcacccttagtgagcctgtgtagttcagctgcctgtgagatgtttggtgaccagctcagtgtattcttgtattcttgatagagaatatttcaggagacaaaagtgcttcttcagaccagacctcaaataacaattttattctttttaataaataagacctcagtaggcggacctgataacagtgacaatgaaaggaaaatagtggcaaaatgtgagtttccagcatgatgtttctcattttattttcttctgtatgaatcaaaagaatgctttacaaaaccatgttcccttaatcacagtgttctctggcttttataggattgtcatagccaggaccacactattgctttttcataacattttctttttgtttctttcttttgaatttcttacagggctgcaaagtatgccaggggagtatgtagcccggggtggtccaatgggtgtgagtatgggacagccaagttatacccaaccccagatgcccccccatcctgctcagctgcgtcatgggccccccatgcatacgtacattcctggacaccctcaccacccaacagtgatgatgcatggaggaccgccccaccctggaatgccaatgtcagcatcaagccccacagttcttaatacaggagacccaacaatgagtggacaagtcatggacattcatgctcagtagcttaagggaatatgcattgtctgcaatggtgactgatttcaaatcatgttttttctgcaatgactgtggagttccattcttggcatctactctggaccaaggagcatccctaattcttcatagggacctttaaaaagcaggaaataccaactgaagtcaatttgggggacatgctaaataactatataagacattaagagaacaaagagtgaaatattgtaaatgctattatactgttatccatattacgttgtttcttatagattttttaaaaaaaatgtgaaatttttccacactatgtgtgttgtttccatagctcttcacttcctccagaagcctccttacattaaaaagccttacagttatcctgcaagggacaggaaggtctgatttgcaggatttttagagcattaaaataactatcaggcagaagaatctttcttctcgcctaggatttcagccatgcgcgcgctctctctctttctctctcttttcctctctctccctctttctagcctggggcttgaatttgcatgtctaattcatttactcaccatatttgaattggcctgaacagatgtaaatcgggaaggatgggaaaaactgcagtcatcaacaatgattaatcagctgttgcaggcagtgtcttaaggagactggtaggaggaggcatggaaaccaaaaggccgtgtgtttagaagcctaattgtcacatcaagcatcattgtccccatgcaacaaccaccaccttatacatcacttcctgttttaagcagctctaaaacatagactgaagatttatttttaatatgttgactttatttctgagcaaagcatcggtcatgtgtgtattttttcatagtcccaccttggagcatttatgtagacattgtaaataaattttgtgcaaaaaggactggaaaaatgaactgtattattgcaatttttttttgtaaaagtagcagtttggtatgagttggcatgcatacaagatttactaagtgggataagctaattatactttttgttgtggataaacaaatgcttgttgatagcctttttctatcaagaaaccaaggagctaattattaataacaatcattgcacactgagtcttagcgtttctgatggaaacagtttggattgtataataacgccaagcccagttgtagtcgtttgagtgcagtaatgaaatctgaatctaaaataaaaacaagattatttttgtcatgctgactccac

SEQ ID NO: 59 - DNA, 2129 bp, Homo sapien
ctctcccctcccctcgggcgtggggggcagtgtgtgactgttctttactccaggctggtgattcaggaggcagccttgtttgtgtttccgtatgcctcctgcaggggagacttgcttttctttgatacataaatggtgatggcttggacaacagtgtagcttcccccagcacaggtgacgatgatgaccctgataaggacaaaaagcgtcacaaaaagcgtggcatctttcccaaagtagccacaaatatcatgagggcgtggctgttccagcatctaacacacccttacccttctgaagaacagaaaaagcagttggcacaagacacgggactcaccatccttcaagtgaacaattggtttattaatgcccggagaagaatagtgcagcccatgatagaccagtccaaccgagcagtaagtcaaggaacaccttataatcctgatggacagcccatgggaggtttcgtaatggacggtcagcaacatatgggaattagagcaccaggacctatgagtggaatgggcatgaatatgggcatggaggggcagtggcactacatgtaaccttcatctagttaaccaatcgcaaagcaagggggaaggctgcaaagtatgccaggggagtatgtagcccggggtggtccaatgggtgtgagtatgggacagccaagttatacccaaccccagatgcccccccatcctgctcagctgcgtcatgggccccccatgcatacgtacattcctggacaccctcaccacccaacagtgatgatgcatggaggaccgccccaccctggaatgccaatgtcagcatcaagccccacagttcttaatacaggagacccaacaatgagtggacaagtcatggacattcatgctcagtagcttaagggaatatgcattgtctgcaatggtgactgatttcaaatcatgttttttctgcaatgactgtggagttccattcttggcatctactctggaccaaggagcatccctaattcttcatagggacctttaaaaagcaggaaataccaactgaagtcaatttgggggacatgctaaataactatataagacattaagagaacaaagagtgaaatattgtaaatgctattatactgttatccatattacgttgtttcttatagattttttaaaaaaaatgtgaaatttttccacactatgtgtgttgtttccatagctcttcacttcctccagaagcctccttacattaaaaagccttacagttatcctgcaagggacaggaaggtctgatttgcaggatttttagagcattaaaataactatcaggcagaagaatctttcttctcgcctaggatttcagccatgcgcgcgctctctctctttctctctcttttcctctctctccctctttctagcctggggcttgaatttgcatgtctaattcatttactcaccatatttgaattggcctgaacagatgtaaatcgggaaggatgggaaaaactgcagtcatcaacaatgattaatcagctgttgcaggcagtgtcttaaggagactggtaggaggaggcatggaaaccaaaaggccgtgtgtttagaagcctaattgtcacatcaagcatcattgtccccatgcaacaaccaccaccttatacatcacttcctgttttaagcagctctaaaacatagactgaagatttatttttaatatgttgactttatttctgagcaaagcatcggtcatgtgtgtattttttcatagtcccaccttggagcatttatgtagacattgtaaataaattttgtgcaaaaaggactggaaaaatgaactgtattattgcaatttttttttgtaaaagtagcagtttggtatgagttggcatgcatacaagatttactaagtgggataagctaattatactttttgttgtggataaacaaatgcttgttgatagcctttttctatcaagaaaccaaggagctaattattaataacaatcattgcacactgagtcttagcgtttctgatggaaacagtttggattgtataataacgccaagcccagttgtagtcgtttgagtgcagtaatgaaatctgaatctaaaataaaaacaagattatttttgtcatgctgactccac

SEQ ID NO: 60 - DNA, 2430 bp, Homo sapien
cagtcttataaagaggattttataacatcagccctcttggaacagagatcatgatgacacggcatctactcgttcaggaggaaccccaggcccttccagcggtggccacacgtcacacagtggggacaacagcagtgagcaaggtgatggcttggacaacagtgtagcttcccccagcacaggtgacgatgatgaccctgataaggacaaaaagcgtcacaaaaagcgtggcatctttcccaaagtagccacaaatatcatgagggcgtggctgttccagcatctaacacacccttacccttctgaagaacagaaaaagcagttggcacaagacacgggactcaccatccttcaagtgaacaattggtttattaatgcccggagaagaatagtgcagcccatgatagaccagtccaaccgagcagtaagtcaaggaacaccttataatcctgatggacagcccatgggaggtttcgtaatggacggtcagcaacatatgggaattagagcaccaggtaagactttgtttttgtggtagttcctcatttttgactccaagagtgtcatcccctcatcaacacaggtaaatccgcctcatccttttctgttatctcaagctggctgccttgccttgtctgctatctgtgcatctaagatattgcagaggggaagccaggatctttatgcactgaagatctcactatttctcaaccctctagatcctgttttttttttaagggtcttttggcactatctgttgactttgctcattttctggcctcttcttggatttttatctcccttctaggacctatgagtggaatgggcatgaatatgggcatggaggggcagtggcactacatgtaaccttcatctagttaaccaatcgcaaagcaagggggaaggctgcaaagtatgccaggggagtatgtagcccggggtggtccaatgggtgtgagtatgggacagccaagttatacccaaccccagatgcccccccatcctgctcagctgcgtcatgggccccccatgcatacgtacattcctggacaccctcaccacccaacagtgatgatgcatggaggaccgccccaccctggaatgccaatgtcagcatcaagccccacagttcttaatacaggagacccaacaatgagtggacaagtcatggacattcatgctcagtagcttaagggaatatgcattgtctgcaatggtgactgatttcaaatcatgttttttctgcaatgactgtggagttccattcttggcatctactctggaccaaggagcatccctaattcttcatagggacctttaaaaagcaggaaataccaactgaagtcaatttgggggacatgctaaataactatataagacattaagagaacaaagagtgaaatattgtaaatgctattatactgttatccatattacgttgtttcttatagattttttaaaaaaaatgtgaaatttttccacactatgtgtgttgtttccatagctcttcacttcctccagaagcctccttacattaaaaagccttacagttatcctgcaagggacaggaaggtctgatttgcaggatttttagagcattaaaataactatcaggcagaagaatctttcttctcgcctaggatttcagccatgcgcgcgctctctctctttctctctcttttcctctctctccctctttctagcctggggcttgaatttgcatgtctaattcatttactcaccatatttgaattggcctgaacagatgtaaatcgggaaggatgggaaaaactgcagtcatcaacaatgattaatcagctgttgcaggcagtgtcttaaggagactggtaggaggaggcatggaaaccaaaaggccgtgtgtttagaagcctaattgtcacatcaagcatcattgtccccatgcaacaaccaccaccttatacatcacttcctgttttaagcagctctaaaacatagactgaagatttatttttaatatgttgactttatttctgagcaaagcatcggtcatgtgtgtattttttcatagtcccaccttggagcatttatgtagacattgtaaataaattttgtgcaaaaaggactggaaaaatgaactgtattattgcaatttttttttgtaaaagtagcagtttggtatgagttggcatgcatacaagatttactaagtgggataagctaattatactttttgttgtggataaacaaatgcttgttgatagcctttttctatcaagaaaccaaggagctaattattaataacaatcattgcacactgagtcttagcgtttctgatggaaacagtttggattgtataataacgccaagcccagttgtagtcgtttgagtgcagtaatgaaatctgaatctaaaataaaaacaagattatttttgtcatgctgactccac

SEQ ID NO: 61 - DNA, 4213 bp, Homo sapien
tccgggggagtttgaatatttgtttcttttcacactggccttaaagaggatatattagaagttgaagtaggaagggagccagagaggccgatggcgcaaaggtacgacgatctaccccattacgggggcatggatggagtaggcatcccctccacgatgtatggggacccgcatgcagccaggtccatgcagccggtccaccacctgaaccacgggcctcctctgcactcgcatcagtacccgcacacagctcataccaacgccatggcccccagcatgggctcctctgtcaatgacgctttaaagagagataaagatgccatttatgggtaggtacaatgggcagcaggttaagtagttgagactcaacgcttccctccttctctgtgcccttggtaagaggaaagtcagagttctctggattggaggtacatctttggtgacttttcattcacatttcatggataatttggggaggtggcctgccatccctgaagccctacatccccatacacactctgtgcacatccagtgccctgctccaccatggcagtgcccgcaagggggtcccagatgagaagaagctggctaaagggcccttgtcccctctcagactccttcagcgggctggagtcctccctcgctcgatttcgcccgagagcgttaggggtttctaaatgcaggcgcctttgtgttgtaacgaaacttttagtttaagggaaaatctcttttaagccactgattgttctgacttgctgagtttactcagcagccttatgctggctctgccactgcacaataaaaccaaagcaggacagttgcaggtcaagcaagggggaacatgttttgcatttagggagtttgaccactgaagtcaaggagaggagcttgctctgaattgttacacacattaagaaacttctagatgttttagcactttgtgctcaaaggcgaaacctgcaggatttagaaataagtaaattcggggtgctcttcctcggaggttgttttctggctgcggtttatactgctttctcctccgccattcgattagaccctgggctagtagaatcctttgaaactcacttgtgcctactgtgtgccgatgaatttgggaacctctttttactttgcagaaacttttatttctatttatttatttttaaaaaatcaggacacactgaccctccctcgctggaaaaaaaaatatatataatctttttattttattttctgatcccttgtgcgatgggcttgtttaattcccaccgttctgtccgcagagttaactacaagtggtttaggctctgggacagaacatttggggaagctttgtaaaggaccccaaactgttaaattcccagctgagctgtgagagctaataaaagacttgagatacctccttgggcattagaagaagcttttctttctttcttcttcttcttcttttttttttttttttcttttttatgggctgagacaagcgacatctaggcccctcgcaatactagctgctttgccacttcgcagagacaaaatgaaaggctctactgcaggaacatttgaaggaactttctttggggggcggtgggggctatcagcgaagggaggggaatgtgcgtggagctgaggaggagcctcccggctctccgagggccttggggttgggatccctaggtgcagcccgttgacagtcggccccacggccatggacgtcctttccccaagttagctgagcgcctgccaccgagatcccccgagcctgggcttcgcgcggccgcctaggaggaacccgcaggaaccagccctccccaactctccgcccggcgcctttctcctccaccggatcctggatgtgcagtggaggggacgagggcttgtcgggtgggaaacttaattcaaaatggctgctggaaacgcttgggttttattcgtagcaaatgttgccaatttctccggccagatacgctaaaccgatcctcagataccgtccatggctcagggcctccgacttcagggctccaggaggaaggggagacaccccctcttccctctcttagcactgatttttgagaaatgtgaattagctacttgtaccccccgcgagccgggggtggcgggcggggacgtctgctcgtcagagtcattcaatgaagatatagccgtgttcgccaaacagattcgcgcagaaaaacctctattttcttctaatccagaactggataacttgatgattcaagccatacaagtattaaggtttcatctattggaattagagaaggtacacgaattatgtgacaatttctgccaccggtatattagctgtttgaaagggaaaatgcctatcgatttggtgatagacgatagagaaggaggatcaaaatcagacagtgaagatataacaagatcagcaaatctaactgaccagccctcttggaacagagatcatgatgacacggcatctactcgttcaggaggaaccccaggcccttccagcggtggccacacgtcacacagtggggacaacagcagtgagcaaggtgatggcttggacaacagtgtagcttcccccagcacaggtgacgatgatgaccctgataaggacaaaaagcgtcacaaaaagcgtggcatctttcccaaagtagccacaaatatcatgagggcgtggctgttccagcatctaacacacccttacccttctgaagaacagaaaaagcagttggcacaagacacgggactcaccatccttcaagtgaacaattggtttattaatgcccggagaagaatagtgcagcccatgatagaccagtccaaccgagcagtaagtcaaggaacaccttataatcctgatggacagcccatgggaggtttcgtaatggacggtcagcaacatatgggaattagagcaccaggacctatgagtggaatgggcatgaatatgggcatggaggggcagtggcactacatgtaaccttcatctagttaaccaatcgcaaagcaagggggaaggctgcaaagtatgccaggggagtatgtagcccggggtggtccaatgggtgtgagtatgggacagccaagttatacccaaccccagatgcccccccatcctgctcagctgcgtcatgggccccccatgcatacgtacattcctggacaccctcaccacccaacagtgatgatgcatggaggaccgccccaccctggaatgccaatgtcagcatcaagccccacagttcttaatacaggagacccaacaatgagtggacaagtcatggacattcatgctcagtagcttaagggaatatgcattgtctgcaatggtgactgatttcaaatcatgttttttctgcaatgactgtggagttccattcttggcatctactctggaccaaggagcatccctaattcttcatagggacctttaaaaagcaggaaataccaactgaagtcaatttgggggacatgctaaataactatataagacattaagagaacaaagagtgaaatattgtaaatgctattatactgttatccatattacgttgtttcttatagattttttaaaaaaaatgtgaaatttttccacactatgtgtgttgtttccatagctcttcacttcctccagaagcctccttacattaaaaagccttacagttatcctgcaagggacaggaaggtctgatttgcaggatttttagagcattaaaataactatcaggcagaagaatctttcttctcgcctaggatttcagccatgcgcgcgctctctctctttctctctcttttcctctctctccctctttctagcctggggcttgaatttgcatgtctaattcatttactcaccatatttgaattggcctgaacagatgtaaatcgggaaggatgggaaaaactgcagtcatcaacaatgattaatcagctgttgcaggcagtgtcttaaggagactggtaggaggaggcatggaaaccaaaaggccgtgtgtttagaagcctaattgtcacatcaagcatcattgtccccatgcaacaaccaccaccttatacatcacttcctgttttaagcagctctaaaacatagactgaagatttatttttaatatgttgactttatttctgagcaaagcatcggtcatgtgtgtattttttcatagtcccaccttggagcatttatgtagacattgtaaataaattttgtgcaaaaaggactgga

SEQ ID NO: 62 - DNA, 4048 bp, Homo sapien
tccgggggagtttgaatatttgtttcttttcacactggccttaaagaggatatattagaagttgaagtaggaagggagccagagaggccgatggcgcaaaggtacgacgatctaccccattacgggggcatggatggagtaggcatcccctccacgatgtatggggacccgcatgcagccaggtccatgcagccggtccaccacctgaaccacgggcctcctctgcactcgcatcagtacccgcacacagctcataccaacgccatggcccccagcatgggctcctctgtcaatgacgctttaaagagagataaagatgccatttatgggtaggtacaatgggcagcaggttaagtagttgagactcaacgcttccctccttctctgtgcccttggtaagaggaaagtcagagttctctggattggaggtacatctttggtgacttttcattcacatttcatggataatttggggaggtggcctgccatccctgaagccctacatccccatacacactctgtgcacatccagtgccctgctccaccatggcagtgcccgcaagggggtcccagatgagaagaagctggctaaagggcccttgtcccctctcagactccttcagcgggctggagtcctccctcgctcgatttcgcccgagagcgttaggggtttctaaatgcaggcgcctttgtgttgtaacgaaacttttagtttaagggaaaatctcttttaagccactgattgttctgacttgctgagtttactcagcagccttatgctggctctgccactgcacaataaaaccaaagcaggacagttgcaggtcaagcaagggggaacatgttttgcatttagggagtttgaccactgaagtcaaggagaggagcttgctctgaattgttacacacattaagaaacttctagatgttttagcactttgtgctcaaaggcgaaacctgcaggatttagaaataagtaaattcggggtgctcttcctcggaggttgttttctggctgcggtttatactgctttctcctccgccattcgattagaccctgggctagtagaatcctttgaaactcacttgtgcctactgtgtgccgatgaatttgggaacctctttttactttgcagaaacttttatttctatttatttatttttaaaaaatcaggacacactgaccctccctcgctggaaaaaaaaatatatataatctttttattttattttctgatcccttgtgcgatgggcttgtttaattcccaccgttctgtccgcagagttaactacaagtggtttaggctctgggacagaacatttggggaagctttgtaaaggaccccaaactgttaaattcccagctgagctgtgagagctaataaaagacttgagatacctccttgggcattagaagaagcttttctttctttcttcttcttcttcttttttttttttttttcttttttatgggctgagacaagcgacatctaggcccctcgcaatactagctgctttgccacttcgcagagacaaaatgaaaggctctactgcaggaacatttgaaggaactttctttggggggcggtgggggctatcagcgaagggaggggaatgtgcgtggagctgaggaggagcctcccggctctccgagggccttggggttgggatccctaggtgcagcccgttgacagtcggccccacggccatggacgtcctttccccaagttagctgagcgcctgccaccgagatcccccgagcctgggcttcgcgcggccgcctaggaggaacccgcaggaaccagccctccccaactctccgcccggcgcctttctcctccaccggatcctggatgtgcagtggaggggacgagggcttgtcgggtgggaaacttaattcaaaatggctgctggaaacgcttgggttttattcgtagcaaatgttgccaatttctccggccagatacgctaaaccgatcctcagataccgtccatggctcagggcctccgacttcagggctccaggaggaaggggagacaccccctcttccctctcttagcactgatttttgagaaatgtgaattagctacttgtaccccccgcgagccgggggtggcgggcggggacgtctgctcgtcagagtcattcaatgaagatatagccgtgttcgccaaacagattcgcgcagaaaaacctctattttcttctaatccagaactggataacttgatgattcaagccatacaagtattaaggtttcatctattggaattagagaaggtacacgaattatgtgacaatttctgccaccggtatattagctgtttgaaagggaaaatgcctatcgatttggtgatagacgatagagaaggaggatcaaaatcagacagtgaagatataacaagatcagcaaatctaactgaccagccctcttggaacagagatcatgatgacacggcatctactcgttcaggaggaaccccaggcccttccagcggtggccacacgtcacacagtggggacaacagcagtgagcaaggtgatggcttggacaacagtgtagcttcccccagcacaggtgacgatgatgaccctgataaggacaaaaagcgtcacaaaaagcgtggcatctttcccaaagtagccacaaatatcatgagggcgtggctgttccagcatctaacacacccttacccttctgaagaacagaaaaagcagttggcacaagacacgggactcaccatccttcaagtgaacaattggtttattaatgcccggagaagaatagtgcagcccatgatagaccagtccaaccgagcagtaagtcaaggaacaccttataatcctgatggacagcccatgggaggtttcgtaatggacggtcagcaacatatgggaattagagcaccaggacctatgagtggaatgggcatgaatatgggcatggaggggcagtggcactacatgtaaccttcatctagttaaccaatcgcaaagcaagggggaaggctgcaaagtatgccaggggagtatgtagcccggggtggtccaatgggtgtgagtatgggacagccaagttatacccaaccccagatgcccccccatcctgctcagctgcgtcatgggccccccatgcatacgtacattcctggacaccctcaccacccaacagtgatgatgcatggaggaccgccccaccctggaatgccaatgtcagcatcaagccccacagttcttaatacaggagacccaacaatgagtggacaagtcatggacattcatgctcagtagcttaagggaatatgcattgtctgcaatggtgactgatttcaaatcatgttttttctgcaatgactgtggagttccattcttggcatctactctggaccaaggagcatccctaattcttcatagggacctttaaaaagcaggaaataccaactgaagtcaatttgggggacatgctaaataactatataagacattaagagaacaaagagtgaaatattgtaaatgctattatactgttatccatattacgttgtttcttatagattttttaaaaaaaatgtgaaatttttccacactatgtgtgttgtttccatagctcttcacttcctccagaagcctccttacattaaaaagccttacagttatcctgcaagggacaggaaggtctgatttgcaggatttttagagcattaaaataactatcaggcagaagaatctttcttctcgcctaggatttcagccatgcgcgcgctctctctctttctctctcttttcctctctctccctctttctagcctggggcttgaatttgcatgtctaattcatttactcaccatatttgaattggcctgaacagatgtaaatcgggaaggatgggaaaaactgcagtcatcaacaatgattaatcagctgttgcaggcagtgtcttaaggagactggtaggaggaggcatggaaaccaaaaggccgtgtgtttaaaacaggaagtgatgtataatggtggttgttgcatggggacaatgatgcttgctagttc

SEQ ID NO: 63 - DNA, 865 bp, Homo sapien
ggaatccacctctccgcctgtgcaacacacactttacacacgcacggggactgcaagcgggcagcatcgatcgtggctcctttaagacaaactcagacagacattttttttaaccctccttctctaatctctttctagcctggggcttgaatttgcatgtctaattcatttactcaccatatttgaattggcctgaacagatgtaaatcgggaaggatgggaaaaactgcagtcatcaacaatgattaatcagctgttgcaggcagtgtcttaaggagactggtaggaggaggcatggaaaccaaaaggccgtgtgtttagaagcctaattgtcacatcaagcatcattgtccccatgcaacaaccaccaccttatacatcacttcctgttttaagcagctctaaaacatagactgaagatttatttttaatatgttgactttatttctgagcaaagcatcggtcatgtgtgtattttttcatagtcccaccttggagcatttatgtagacattgtaaataaattttgtgcaaaaaggactggaaaaatgaactgtattattgcaatttttttttgtaaaagtagcagtttggtatgagttggcatgcatacaagatttactaagtgggataagctaattatactttttgttgtggataaacaaatgcttgttgatagcctttttctatcaagaaaccaaggagctaattattaataacaatcattgcacactgagtcttagcgtttctgatggaaacagtttggattgtataataacgccaagcccagttgtagtcgtttgagtgcagtaatgaaatctgaatctaaaataaaaacaagattatttttgtcatgctgactccac

SEQ ID NO: 64 - DNA, 3462 bp, Homo sapien
tccgggggagtttgaatatttgtttcttttcacactggccttaaagaggatatattagaagttgaagtaggaagggagccagagaggccgatggcgcaaaggtacgacgatctaccccattacgggggcatggatggagtaggcatcccctccacgatgtatggggacccgcatgcagccaggtccatgcagccggtccaccacctgaaccacgggcctcctctgcactcgcatcagtacccgcacacagctcataccaacgccatggcccccagcatgggctcctctgtcaatgacgctttaaagagagataaagatgccatttatgggtaggtacaatgggcagcaggttaagtagttgagactcaacgcttccctccttctctgtgcccttggtaagaggaaagtcagagttctctggattggaggtacatctttggtgacttttcattcacatttcatggataatttggggaggtggcctgccatccctgaagccctacatccccatacacactctgtgcacatccagtgccctgctccaccatggcagtgcccgcaagggggtcccagatgagaagaagctggctaaagggcccttgtcccctctcagactccttcagcgggctggagtcctccctcgctcgatttcgcccgagagcgttaggggtttctaaatgcaggcgcctttgtgttgtaacgaaacttttagtttaagggaaaatctcttttaagccactgattgttctgacttgctgagtttactcagcagccttatgctggctctgccactgcacaataaaaccaaagcaggacagttgcaggtcaagcaagggggaacatgttttgcatttagggagtttgaccactgaagtcaaggagaggagcttgctctgaattgttacacacattaagaaacttctagatgttttagcactttgtgctcaaaggcgaaacctgcaggatttagaaataagtaaattcggggtgctcttcctcggaggttgttttctggctgcggtttatactgctttctcctccgccattcgattagaccctgggctagtagaatcctttgaaactcacttgtgcctactgtgtgccgatgaatttgggaacctctttttactttgcagaaacttttatttctatttatttatttttaaaaaatcaggacacactgaccctccctcgctggaaaaaaaaatatatataatctttttattttattttctgatcccttgtgcgatgggcttgtttaattcccaccgttctgtccgcagagttaactacaagtggtttaggctctgggacagaacatttggggaagctttgtaaaggaccccaaactgttaaattcccagctgagctgtgagagctaataaaagacttgagatacctccttgggcattagaagaagcttttctttctttcttcttcttcttcttttttttttttttttcttttttatgggctgagacaagcgacatctaggcccctcgcaatactagctgctttgccacttcgcagagacaaaatgaaaggctctactgcaggaacatttgaaggaactttctttggggggcggtgggggctatcagcgaagggaggggaatgtgcgtggagctgaggaggagcctcccggctctccgagggccttggggttgggatccctaggtgcagcccgttgacagtcggccccacggccatggacgtcctttccccaagttagctgagcgcctgccaccgagatcccccgagcctgggcttcgcgcggccgcctaggaggaacccgcaggaaccagccctccccaactctccgcccggcgcctttctcctccaccggatcctggatgtgcagtggaggggacgagggcttgtcgggtgggaaacttaattcaaaatggctgctggaaacgcttgggttttattcgtagcaaatgttgccaatttctccggccagatacgctaaaccgatcctcagataccgtccatggctcagggcctccgacttcagggctccaggaggaaggggagacaccccctcttccctctcttagcactgatttttgagaaatgtgaattagctacttgtaccccccgcgagccgggggtggcgggcggggacgtctgctcgtcagagtcattcaatgaagatatagccgtgttcgccaaacagattcgcgcagaaaaacctctattttcttctaatccagaactggataacttgatgattcaagccatacaagtattaaggtttcatctattggaattagagaaggtacacgaattatgtgacaatttctgccaccggtatattagctgtttgaaagggaaaatgcctatcgatttggtgatagacgatagagaaggaggatcaaaatcagacagtgaagatataacaagatcagcaaatctaactgaccagccctcttggaacagagatcatgatgacacggcatctactcgttcaggaggaaccccaggcccttccagcggtggccacacgtcacacagtggggacaacagcagtgagcaaggtgatggcttggacaacagtgtagcttcccccagcacaggtgacgatgatgaccctgataaggacaaaaagcgtcacaaaaagcgtggcatctttcccaaagtagccacaaatatcatgagggcgtggctgttccagcatctaacacacccttacccttctgaagaacagaaaaagcagttggcacaagacacgggactcaccatccttcaagtgaacaattggtttattaatgcccggagaagaatagtgcagcccatgatagaccagtccaaccgagcagtaagtcaaggaacaccttataatcctgatggacagcccatgggaggtttcgtaatggacggtcagcaacatatgggaattagagcaccaggacctatgagtggaatgggcatgaatatgggcatggaggggcagtggcactacatgtaaccttcatctagttaaccaatcgcaaagcaagggggaagtaagtacaaatggggtctttgttttcactttgtcctaggaatatttttcctcttgcattttcttatgttctccttgcccatagcttcatgcttgttcattcctttccattaaactcctggtttcttgcttccatcattttctttttggttgtgatcaagcttttaagcttataaatactgtgtatgatgtacatttatcctgtgtgttgctattgtacagtactgaccacatgacaaaacaagaaacagtcaggaggtgggggagtgggttgtcatagcaacagactgatttgcaaaatgtaagcagtctgcagcagtgcaaggagaggaaagagcatgtccccaaagtgtcataaatctgtctaaccgcagttgatgcatgagttacatttctacactaacctgcaagacaccgaaaagctaaacagagacttcttttaggtaaaataaaca

SEQ ID NO: 65 - DNA, 3163 bp, Homo sapien
  misc_feature (2969)..(2969): n=a,c,g or t
  misc_feature (2991)..(2991): n=a,c,g or t
  misc_feature (3001)..(3001): n=a,c,g or t
  misc_feature (3060)..(3060): n=a,c,g or t
  misc_feature (3067)..(3067): n=a,c,g or t
  misc_feature (3118)..(3118): n=a,c,g or t
  misc_feature (3125)..(3125): n=a,c,g or t
tccgggggagtttgaatatttgtttcttttcacactggccttaaagaggatatattagaagttgaagtaggaagggagccagagaggccgatggcgcaaaggtacgacgatctaccccattacgggggcatggatggagtaggcatcccctccacgatgtatggggacccgcatgcagccaggtccatgcagccggtccaccacctgaaccacgggcctcctctgcactcgcatcagtacccgcacacagctcataccaacgccatggcccccagcatgggctcctctgtcaatgacgctttaaagagagataaagatgccatttatgggtaggtacaatgggcagcaggttaagtagttgagactcaacgcttccctccttctctgtgcccttggtaagaggaaagtcagagttctctggattggaggtacatctttggtgacttttcattcacatttcatggataatttggggaggtggcctgccatccctgaagccctacatccccatacacactctgtgcacatccagtgccctgctccaccatggcagtgcccgcaagggggtcccagatgagaagaagctggctaaagggcccttgtcccctctcagactccttcagcgggctggagtcctccctcgctcgatttcgcccgagagcgttaggggtttctaaatgcaggcgcctttgtgttgtaacgaaacttttagtttaagggaaaatctcttttaagccactgattgttctgacttgctgagtttactcagcagccttatgctggctctgccactgcacaataaaaccaaagcaggacagttgcaggtcaagcaagggggaacatgttttgcatttagggagtttgaccactgaagtcaaggagaggagcttgctctgaattgttacacacattaagaaacttctagatgttttagcactttgtgctcaaaggcgaaacctgcaggatttagaaataagtaaattcggggtgctcttcctcggaggttgttttctggctgcggtttatactgctttctcctccgccattcgattagaccctgggctagtagaatcctttgaaactcacttgtgcctactgtgtgccgatgaatttgggaacctctttttactttgcagaaacttttatttctatttatttatttttaaaaaatcaggacacactgaccctccctcgctggaaaaaaaaatatatataatctttttattttattttctgatcccttgtgcgatgggcttgtttaattcccaccgttctgtccgcagagttaactacaagtggtttaggctctgggacagaacatttggggaagctttgtaaaggaccccaaactgttaaattcccagctgagctgtgagagctaataaaagacttgagatacctccttgggcattagaagaagcttttctttctttcttcttcttcttcttttttttttttttttcttttttatgggctgagacaagcgacatctaggcccctcgcaatactagctgctttgccacttcgcagagacaaaatgaaaggctctactgcaggaacatttgaaggaactttctttggggggcggtgggggctatcagcgaagggaggggaatgtgcgtggagctgaggaggagcctcccggctctccgagggccttggggttgggatccctaggtgcagcccgttgacagtcggccccacggccatggacgtcctttccccaagttagctgagcgcctgccaccgagatcccccgagcctgggcttcgcgcggccgcctaggaggaacccgcaggaaccagccctccccaactctccgcccggcgcctttctcctccaccggatcctggatgtgcagtggaggggacgagggcttgtcgggtgggaaacttaattcaaaatggctgctggaaacgcttgggttttattcgtagcaaatgttgccaatttctccggccagatacgctaaaccgatcctcagataccgtccatggctcagggcctccgacttcagggctccaggaggaaggggagacaccccctcttccctctcttagcactgatttttgagaaatgtgaattagctacttgtaccccccgcgagccgggggtggcgggcggggacgtctgctcgtcagagtcattcaatgaagatatagccgtgttcgccaaacagattcgcgcagaaaaacctctattttcttctaatccagaactggataacttgatgattcaagccatacaagtattaaggtttcatctattggaattagagaaggtacacgaattatgtgacaatttctgccaccggtatattagctgtttgaaagggaaaatgcctatcgatttggtgatagacgatagagaaggaggatcaaaatcagacagtgaagatataacaagatcagcaaatctaactgaccagccctcttggaacagagatcatgatgacacggcatctactcgttcaggaggaaccccaggcccttccagcggtggccacacgtcacacagtggggacaacagcagtgagcaaggtgatggcttggacaacagtgtagcttcccccagcacaggtgacgatgatgaccctgataaggacaaaaagcgtcacaaaaagcgtggcatctttcccaaagtagccacaaatatcatgagggcgtggctgttccagcatctaacacacccttacccttctgaagaacagaaaaagcagttggcacaagacacgggactcaccatccttcaagtgaacaattggtttattaatgcccggagaagaatagtgcagcccatgatagaccagtccaaccgagcagtaagtcaaggaacaccttataatcctgatggacagcccatgggaggtttcgtaatggacggtcagcaacatatgggaattagagcaccaggacctatgagtggaatgggcatgaatatgggcatggaggggcagtggcactaccaantttgggtttttaaaaccctttncaatccttantttaacccaattccgccaaaagcaaggggggaaggctgcaaagttattgccagggggantatgtancccggggttggtccaattggggtgttgaagttattggggaacagccccaantttattncccccaaccccccaaaattgccccccccatcctggctc

SEQ ID NO: 66 - DNA, 2777 bp, Homo sapien
tccgggggagtttgaatatttgtttcttttcacactggccttaaagaggatatattagaagttgaagtaggaagggagccagagaggccgatggcgcaaaggtacgacgatctaccccattacgggggcatggatggagtaggcatcccctccacgatgtatggggacccgcatgcagccaggtccatgcagccggtccaccacctgaaccacgggcctcctctgcactcgcatcagtacccgcacacagctcataccaacgccatggcccccagcatgggctcctctgtcaatgacgctttaaagagagataaagatgccatttatgggtaggtacaatgggcagcaggttaagtagttgagactcaacgcttccctccttctctgtgcccttggtaagaggaaagtcagagttctctggattggaggtacatctttggtgacttttcattcacatttcatggataatttggggaggtggcctgccatccctgaagccctacatccccatacacactctgtgcacatccagtgccctgctccaccatggcagtgcccgcaagggggtcccagatgagaagaagctggctaaagggcccttgtcccctctcagactccttcagcgggctggagtcctccctcgctcgatttcgcccgagagcgttaggggtttctaaatgcaggcgcctttgtgttgtaacgaaacttttagtttaagggaaaatctcttttaagccactgattgttctgacttgctgagtttactcagcagccttatgctggctctgccactgcacaataaaaccaaagcaggacagttgcaggtcaagcaagggggaacatgttttgcatttagggagtttgaccactgaagtcaaggagaggagcttgctctgaattgttacacacattaagaaacttctagatgttttagcactttgtgctcaaaggcgaaacctgcaggatttagaaataagtaaattcggggtgctcttcctcggaggttgttttctggctgcggtttatactgctttctcctccgccattcgattagaccctgggctagtagaatcctttgaaactcacttgtgcctactgtgtgccgatgaatttgggaacctctttttactttgcagaaacttttatttctatttatttatttttaaaaaatcaggacacactgaccctccctcgctggaaaaaaaaatatatataatctttttattttattttctgatcccttgtgcgatgggcttgtttaattcccaccgttctgtccgcagagttaactacaagtggtttaggctctgggacagaacatttggggaagctttgtaaaggaccccaaactgttaaattcccagctgagctgtgagagctaataaaagacttgagatacctccttgggcattagaagaagcttttctttctttcttcttcttcttcttttttttttttttttcttttttatgggctgagacaagcgacatctaggcccctcgcaatactagctgctttgccacttcgcagagacaaaatgaaaggctctactgcaggaacatttgaaggaactttctttggggggcggtgggggctatcagcgaagggaggggaatgtgcgtggagctgaggaggagcctcccggctctccgagggccttggggttgggatccctaggtgcagcccgttgacagtcggccccacggccatggacgtcctttccccaagttagctgagcgcctgccaccgagatcccccgagcctgggcttcgcgcggccgcctaggaggaacccgcaggaaccagccctccccaactctccgcccggcgcctttctcctccaccggatcctggatgtgcagtggaggggacgagggcttgtcgggtgggaaacttaattcaaaatggctgctggaaacgcttgggttttattcgtagcaaatgttgccaatttctccggccagatacgctaaaccgatcctcagataccgtccatggctcagggcctccgacttcagggctccaggaggaaggggagacaccccctcttccctctcttagcactgatttttgagaaatgtgaattagctacttgtaccccccgcgagccgggggtggcgggcggggacgtctgctcgtcagagtcattcaatgaagatatagccgtgttcgccaaacagattcgcgcagaaaaacctctattttcttctaatccagaactggataacttgatgattcaagccatacaagtattaaggtttcatctattggaattagagaaggtacacgaattatgtgacaatttctgccaccggtatattagctgtttgaaagggaaaatgcctatcgatttggtgatagacgatagagaaggaggatcaaaatcagacagtgaagatataacaagatcagcaaatctaactgaccagccctcttggaacagagatcatgatgacacggcatctactcgttcaggaggaaccccaggcccttccagcggtggccacacgtcacacagtggggacaacagcagtgagcaaggtgatggcttggacaacagtgtagcttcccccagcacaggtgacgatgatgaccctgataaggacaaaaagcgtcacaaaaagcgtggcatctttcccaaagtagccacaaatatcatgagggcgtggctgttccagcatctaacagtaagtggattctaaatgacatatataaactaaatatggacaatgaaccagtttttatacaaaaaaatgagaaaaaagtgatccctctgga

SEQ ID NO: 67 - DNA, 3008 bp, Homo sapien
tccgggggagtttgaatatttgtttcttttcacactggccttaaagaggatatattagaagttgaagtaggaagggagccagagaggccgatggcgcaaaggtacgacgatctaccccattacgggggcatggatggagtaggcatcccctccacgatgtatggggacccgcatgcagccaggtccatgcagccggtccaccacctgaaccacgggcctcctctgcactcgcatcagtacccgcacacagctcataccaacgccatggcccccagcatgggctcctctgtcaatgacgctttaaagagagataaagatgccatttatgggtaggtacaatgggcagcaggttaagtagttgagactcaacgcttccctccttctctgtgcccttggtaagaggaaagtcagagttctctggattggaggtacatctttggtgacttttcattcacatttcatggataatttggggaggtggcctgccatccctgaagccctacatccccatacacactctgtgcacatccagtgccctgctccaccatggcagtgcccgcaagggggtcccagatgagaagaagctggctaaagggcccttgtcccctctcagactccttcagcgggctggagtcctccctcgctcgatttcgcccgagagcgttaggggtttctaaatgcaggcgcctttgtgttgtaacgaaacttttagtttaagggaaaatctcttttaagccactgattgttctgacttgctgagtttactcagcagccttatgctggctctgccactgcacaataaaaccaaagcaggacagttgcaggtcaagcaagggggaacatgttttgcatttagggagtttgaccactgaagtcaaggagaggagcttgctctgaattgttacacacattaagaaacttctagatgttttagcactttgtgctcaaaggcgaaacctgcaggatttagaaataagtaaattcggggtgctcttcctcggaggttgttttctggctgcggtttatactgctttctcctccgccattcgattagaccctgggctagtagaatcctttgaaactcacttgtgcctactgtgtgccgatgaatttgggaacctctttttactttgcagaaacttttatttctatttatttatttttaaaaaatcaggacacactgaccctccctcgctggaaaaaaaaatatatataatctttttattttattttctgatcccttgtgcgatgggcttgtttaattcccaccgttctgtccgcagagttaactacaagtggtttaggctctgggacagaacatttggggaagctttgtaaaggaccccaaactgttaaattcccagctgagctgtgagagctaataaaagacttgagatacctccttgggcattagaagaagcttttctttctttcttcttcttcttcttttttttttttttttcttttttatgggctgagacaagcgacatctaggcccctcgcaatactagctgctttgccacttcgcagagacaaaatgaaaggctctactgcaggaacatttgaaggaactttctttggggggcggtgggggctatcagcgaagggaggggaatgtgcgtggagctgaggaggagcctcccggctctccgagggccttggggttgggatccctaggtgcagcccgttgacagtcggccccacggccatggacgtcctttccccaagttagctgagcgcctgccaccgagatcccccgagcctgggcttcgcgcggccgcctaggaggaacccgcaggaaccagccctccccaactctccgcccggcgcctttctcctccaccggatcctggatgtgcagtggaggggacgagggcttgtcgggtgggaaacttaattcaaaatggctgctggaaacgcttgggttttattcgtagcaaatgttgccaatttctccggccagatacgctaaaccgatcctcagataccgtccatggctcagggcctccgacttcagggctccaggaggaaggggagacaccccctcttccctctcttagcactgatttttgagaaatgtgaattagctacttgtaccccccgcgagccgggggtggcgggcggggacgtctgctcgtcagagtcattcaatgaagatatagccgtgttcgccaaacagattcgcgcagaaaaacctctattttcttctaatccagaactggataacttgatgattcaagccatacaagtattaaggtttcatctattggaattagagaaggtaatttctctagcctcttttccttttacttaccccttacccccaaacacacaggggggagggttccgaatggctgaagttcagccttctgatacatttgcataaatgtctttctttctggtaattagtgtcaaggccaatcttagcgtccatttctcttcgcagtttaattacaatttcagccactaaaactgggatcacaaacgccctagccttgtgttcattcttaataacttgctggctttgtgtaaatagttgcaattctgtgcatcccagctgatgtttcgaatgctgctctgaggttgtttcacaagttcatacctctgttgtctcttctcatcctcttccttctcttctttgctacctctgagggagaaaaaagttttattcagttgtagtgagtttctggaagacagtcttgagagcaagggcagatcagacacaggggagaggcagaaggggagaaggaggaggagcgggaaggagtctggaggaggtggtggggaggcacattaaacgttttgcagagacaaagcagagttgatagttgtgtcaatttcttgaatctgtgaatcctgcacacactccaccttcacactcaagaaagggtgtgggataacatgattttgctagctgttctataaatctcagcaataaaaacttaatgcattgtaattcaaactaacattaaattgcaagcacactggggtttcttgtgaatttttgc

SEQ ID NO: 68 - DNA, 1647 bp, Homo sapien
tccgggggagtttgaatatttgtttcttttcacactggccttaaagaggatatattagaagttgaagtaggaagggagccagagaggccgatggcgcaaaggtacgacgatctaccccattacgggggcatggatggagtaggcatcccctccacgatgtatggggacccgcatgcagccaggtccatgcagccggtccaccacctgaaccacgggcctcctctgcactcgcatcagtacccgcacacagctcataccaacgccatggcccccagcatgggctcctctgtcaatgacgctttaaagagagataaagatgccatttatggacaccccctcttccctctcttagcactgatttttgagaaatgtgaattagctacttgtaccccccgcgagccgggggtggcgggcggggacgtctgctcgtcagagtcattcaatgaagatatagccgtgttcgccaaacagattcgcgcagaaaaacctctattttcttctaatccagaactggataacttgatgattcaagccatacaagtattaaggtttcatctattggaattagagaaggtacacgaattatgtgacaatttctgccaccggtatattagctgtttgaaagggaaaatgcctatcgatttggtgatagacgatagagaaggaggatcaaaatcagacagtgaagatataacaagatcagcaaatctaactgaccagccctcttggaacagagatcatgatgacacggcatctactcgttcaggaggaaccccaggcccttccagcggtggccacacgtcacacagtggggacaacagcagtgagcaaggtgatggcttggacaacagtgtagcttcccccagcacaggtgacgatgatgaccctgataaggacaaaaagcgtcacaaaaagcgtggcatctttcccaaagtagccacaaatatcatgagggcgtggctgttccagcatctaacacacccttacccttctgaagaacagaaaaagcagttggcacaagacacgggactcaccatccttcaagtgaacaattggtttattaatgcccggagaagaatagtgcagcccatgatagaccagtccaaccgagcagtaagtcaaggaacaccttataatcctgatggacagcccatgggaggtttcgtaatggacggtcagcaacatatgggaattagagcaccaggacctatgagtggaatgggcatgaatatgggcatggaggggcagtggcactacatgtaaccttcatctagttaaccaatcgcaaagcaagggggaaggctgcaaagtatgccaggggagtatgtagcccggggtggtccaatgggtgtgagtatgggacagccaagttatacccaaccccagatgcccccccatcctgctcagctgcgtcatgggccccttgataggagttcctgaacctcgcacgaaagtgtgtgctatgggcggccgcctgaatgcctttaggttacccacatttattagggccaattggggcagatggttccctcgggtaggattgatttctgtgggtgggtttaaaaggggtgtgtgcgatttttgtgttgggggggtttttttgtgggggcggggttagagggtttaagggcgcgcgtggggggggga

SEQ ID NO: 69 - DNA, 4534 bp, Homo sapien
tccgggggagtttgaatatttgtttcttttcacactggccttaaagaggatatattagaagttgaagtaggaagggagccagagaggccgatggcgcaaaggtacgacgatctaccccattacgggggcatggatggagtaggcatcccctccacgatgtatggggacccgcatgcagccaggtccatgcagccggtccaccacctgaaccacgggcctcctctgcactcgcatcagtacccgcacacagctcataccaacgccatggcccccagcatgggctcctctgtcaatgacgctttaaagagagataaagatgccatttatgggtaggtacaatgggcagcaggttaagtagttgagactcaacgcttccctccttctctgtgcccttggtaagaggaaagtcagagttctctggattggaggtacatctttggtgacttttcattcacatttcatggataatttggggaggtggcctgccatccctgaagccctacatccccatacacactctgtgcacatccagtgccctgctccaccatggcagtgcccgcaagggggtcccagatgagaagaagctggctaaagggcccttgtcccctctcagactccttcagcgggctggagtcctccctcgctcgatttcgcccgagagcgttaggggtttctaaatgcaggcgcctttgtgttgtaacgaaacttttagtttaagggaaaatctcttttaagccactgattgttctgacttgctgagtttactcagcagccttatgctggctctgccactgcacaataaaaccaaagcaggacagttgcaggtcaagcaagggggaacatgttttgcatttagggagtttgaccactgaagtcaaggagaggagcttgctctgaattgttacacacattaagaaacttctagatgttttagcactttgtgctcaaaggcgaaacctgcaggatttagaaataagtaaattcggggtgctcttcctcggaggttgttttctggctgcggtttatactgctttctcctccgccattcgattagaccctgggctagtagaatcctttgaaactcacttgtgcctactgtgtgccgatgaatttgggaacctctttttactttgcagaaacttttatttctatttatttatttttaaaaaatcaggacacactgaccctccctcgctggaaaaaaaaatatatataatctttttattttattttctgatcccttgtgcgatgggcttgtttaattcccaccgttctgtccgcagagttaactacaagtggtttaggctctgggacagaacatttggggaagctttgtaaaggaccccaaactgttaaattcccagctgagctgtgagagctaataaaagacttgagatacctccttgggcattagaagaagcttttctttctttcttcttcttcttcttttttttttttttttcttttttatgggctgagacaagcgacatctaggcccctcgcaatactagctgctttgccacttcgcagagacaaaatgaaaggctctactgcaggaacatttgaaggaactttctttggggggcggtgggggctatcagcgaagggaggggaatgtgcgtggagctgaggaggagcctcccggctctccgagggccttggggttgggatccctaggtgcagcccgttgacagtcggccccacggccatggacgtcctttccccaagttagctgagcgcctgccaccgagatcccccgagcctgggcttcgcgcggccgcctaggaggaacccgcaggaaccagccctccccaactctccgcccggcgcctttctcctccaccggatcctggatgtgcagtggaggggacgagggcttgtcgggtgggaaacttaattcaaaatggctgctggaaacgcttgggttttattcgtagcaaatgttgccaatttctccggccagatacgctaaaccgatcctcagataccgtccatggctcagggcctccgacttcagggctccaggaggaaggggagacaccccctcttccctctcttagcactgatttttgagaaatgtgaattagctacttgtaccccccgcgagccgggggtggcgggcggggacgtctgctcgtcagagtcattcaatgaagatatagccgtgttcgccaaacagattcgcgcagaaaaacctctattttcttctaatccagaactggataacttgatgattcaagccatacaagtattaaggtttcatctattggaattagagaaggtacacgaattatgtgacaatttctgccaccggtatattagctgtttgaaagggaaaatgcctatcgatttggtgatagacgatagagaaggaggatcaaaatcagacagtgaagatataacaagatcagcaaatctaactgaccagccctcttggaacagagatcatgatgacacggcatctactcgttcaggaggaaccccaggcccttccagcggtggccacacgtcacacagtggggacaacagcagtgagcaaggtgatggcttggacaacagtgtagcttcccccagcacaggtgacgatgatgaccctgataaggacaaaaagcgtcacaaaaagcgtggcatctttcccaaagtagccacaaatatcatgagggcgtggctgttccagcatctaacacacccttacccttctgaagaacagaaaaagcagttggcacaagacacgggactcaccatccttcaagtgaacaattggtttattaatgcccggagaagaatagtgcagcccatgatagaccagtccaaccgagcagtaagtcaaggaacaccttataatcctgatggacagcccatgggaggtttcgtaatggacggtcagcaacatatgggaattagagcaccaggacctatgagtggaatgggcatgaatatgggcatggaggggcagtggcactacatgtaaccttcatctagttaaccaatcgcaaagcaagggggaaggctgcaaagtatgccaggggagtatgtagcccggggtggtccaatgggtgtgagtatgggacagccaagttatacccaaccccagatgcccccccatcctgctcagctgcgtcatgggccccccatgcatacgtacattcctggacaccctcaccacccaacagtgatgatgcatggaggaccgccccaccctggaatgccaatgtcagcatcaagccccacagttcttaatacaggagacccaacaatgagtggacaagtcatggacattcatgctcagtagcttaagggaatatgcattgtctgcaatggtgactgatttcaaatcatgttttttctgcaatgactgtggagttccattcttggcatctactctggaccaaggagcatccctaattcttcatagggacctttaaaaagcaggaaataccaactgaagtcaatttgggggacatgctaaataactatataagacattaagagaacaaagagtgaaatattgtaaatgctattatactgttatccatattacgttgtttcttatagattttttaaaaaaaatgtgaaatttttccacactatgtgtgttgtttccatagctcttcacttcctccagaagcctccttacattaaaaagccttacagttatcctgcaagggacaggaaggtctgatttgcaggatttttagagcattaaaataactatcaggcagaagaatctttcttctcgcctaggatttcagccatgcgcgcgctctctctctttctctctcttttcctctctctccctctttctagcctggggcttgaatttgcatgtctaattcatttactcaccatatttgaattggcctgaacagatgtaaatcgggaaggatgggaaaaactgcagtcatcaacaatgattaatcagctgttgcaggcagtgtcttaaggagactggtaggaggaggcatggaaaccaaaaggccgtgtgtttagaagcctaattgtcacatcaagcatcattgtccccatgcaacaaccaccaccttatacatcacttcctgttttaagcagctctaaaacatagactgaagatttatttttaatatgttgactttatttctgagcaaagcatcggtcatgtgtgtattttttcatagtcccaccttggagcatttatgtagacattgtaaataaattttgtgcaaaaaggactggaaaaatgaactgtattattgcaatttttttttgtaaaagtagcagtttggtatgagttggcatgcatacaagatttactaagtgggataagctaattatactttttgttgtggataaacaaatgcttgttgatagcctttttctatcaagaaaccaaggagctaattattaataacaatcattgcacactgagtcttagcgtttctgatggaaacagtttggattgtataataacgccaagcccagttgtagtcgtttgagtgcagtaatgaaatctgaatctaaaataaaaacaagattatttttgtcatgctgactccac

SEQ ID NO: 70 - DNA, 4827 bp, Homo sapien
tccgggggagtttgaatatttgtttcttttcacactggccttaaagaggatatattagaagttgaagtaggaagggagccagagaggccgatggcgcaaaggtacgacgatctaccccattacgggggcatggatggagtaggcatcccctccacgatgtatggggacccgcatgcagccaggtccatgcagccggtccaccacctgaaccacgggcctcctctgcactcgcatcagtacccgcacacagctcataccaacgccatggcccccagcatgggctcctctgtcaatgacgctttaaagagagataaagatgccatttatgggtaggtacaatgggcagcaggttaagtagttgagactcaacgcttccctccttctctgtgcccttggtaagaggaaagtcagagttctctggattggaggtacatctttggtgacttttcattcacatttcatggataatttggggaggtggcctgccatccctgaagccctacatccccatacacactctgtgcacatccagtgccctgctccaccatggcagtgcccgcaagggggtcccagatgagaagaagctggctaaagggcccttgtcccctctcagactccttcagcgggctggagtcctccctcgctcgatttcgcccgagagcgttaggggtttctaaatgcaggcgcctttgtgttgtaacgaaacttttagtttaagggaaaatctcttttaagccactgattgttctgacttgctgagtttactcagcagccttatgctggctctgccactgcacaataaaaccaaagcaggacagttgcaggtcaagcaagggggaacatgttttgcatttagggagtttgaccactgaagtcaaggagaggagcttgctctgaattgttacacacattaagaaacttctagatgttttagcactttgtgctcaaaggcgaaacctgcaggatttagaaataagtaaattcggggtgctcttcctcggaggttgttttctggctgcggtttatactgctttctcctccgccattcgattagaccctgggctagtagaatcctttgaaactcacttgtgcctactgtgtgccgatgaatttgggaacctctttttactttgcagaaacttttatttctatttatttatttttaaaaaatcaggacacactgaccctccctcgctggaaaaaaaaatatatataatctttttattttattttctgatcccttgtgcgatgggcttgtttaattcccaccgttctgtccgcagagttaactacaagtggtttaggctctgggacagaacatttggggaagctttgtaaaggaccccaaactgttaaattcccagctgagctgtgagagctaataaaagacttgagatacctccttgggcattagaagaagcttttctttctttcttcttcttcttcttttttttttttttttcttttttatgggctgagacaagcgacatctaggcccctcgcaatactagctgctttgccacttcgcagagacaaaatgaaaggctctactgcaggaacatttgaaggaactttctttggggggcggtgggggctatcagcgaagggaggggaatgtgcgtggagctgaggaggagcctcccggctctccgagggccttggggttgggatccctaggtgcagcccgttgacagtcggccccacggccatggacgtcctttccccaagttagctgagcgcctgccaccgagatcccccgagcctgggcttcgcgcggccgcctaggaggaacccgcaggaaccagccctccccaactctccgcccggcgcctttctcctccaccggatcctggatgtgcagtggaggggacgagggcttgtcgggtgggaaacttaattcaaaatggctgctggaaacgcttgggttttattcgtagcaaatgttgccaatttctccggccagatacgctaaaccgatcctcagataccgtccatggctcagggcctccgacttcagggctccaggaggaaggggagacaccccctcttccctctcttagcactgatttttgagaaatgtgaattagctacttgtaccccccgcgagccgggggtggcgggcggggacgtctgctcgtcagagtcattcaatgaagatatagccgtgttcgccaaacagattcgcgcagaaaaacctctattttcttctaatccagaactggataacttgatgattcaagccatacaagtattaaggtttcatctattggaattagagaaggtacacgaattatgtgacaatttctgccaccggtatattagctgtttgaaagggaaaatgcctatcgatttggtgatagacgatagagaaggaggatcaaaatcagacagtgaagatataacaagatcagcaaatctaactgaccagccctcttggaacagagatcatgatgacacggcatctactcgttcaggaggaaccccaggcccttccagcggtggccacacgtcacacagtggggacaacagcagtgagcaaggtgatggcttggacaacagtgtagcttcccccagcacaggtgacgatgatgaccctgataaggacaaaaagcgtcacaaaaagcgtggcatctttcccaaagtagccacaaatatcatgagggcgtggctgttccagcatctaacacacccttacccttctgaagaacagaaaaagcagttggcacaagacacgggactcaccatccttcaagtgaacaattggtttattaatgcccggagaagaatagtgcagcccatgatagaccagtccaaccgagcagtaagtcaaggaacaccttataatcctgatggacagcccatgggaggtttcgtaatggacggtcagcaacatatgggaattagagcaccaggtaagactttgtttttgtggtagttcctcatttttgactccaagagtgtcatcccctcatcaacacaggtaaatccgcctcatccttttctgttatctcaagctggctgccttgccttgtctgctatctgtgcatctaagatattgcagaggggaagccaggatctttatgcactgaagatctcactatttctcaaccctctagatcctgttttttttttaagggtcttttggcactatctgttgactttgctcattttctggcctcttcttggatttttatctcccttctaggacctatgagtggaatgggcatgaatatgggcatggaggggcagtggcactacatgtaaccttcatctagttaaccaatcgcaaagcaagggggaaggctgcaaagtatgccaggggagtatgtagcccggggtggtccaatgggtgtgagtatgggacagccaagttatacccaaccccagatgcccccccatcctgctcagctgcgtcatgggccccccatgcatacgtacattcctggacaccctcaccacccaacagtgatgatgcatggaggaccgccccaccctggaatgccaatgtcagcatcaagccccacagttcttaatacaggagacccaacaatgagtggacaagtcatggacattcatgctcagtagcttaagggaatatgcattgtctgcaatggtgactgatttcaaatcatgttttttctgcaatgactgtggagttccattcttggcatctactctggaccaaggagcatccctaattcttcatagggacctttaaaaagcaggaaataccaactgaagtcaatttgggggacatgctaaataactatataagacattaagagaacaaagagtgaaatattgtaaatgctattatactgttatccatattacgttgtttcttatagattttttaaaaaaaatgtgaaatttttccacactatgtgtgttgtttccatagctcttcacttcctccagaagcctccttacattaaaaagccttacagttatcctgcaagggacaggaaggtctgatttgcaggatttttagagcattaaaataactatcaggcagaagaatctttcttctcgcctaggatttcagccatgcgcgcgctctctctctttctctctcttttcctctctctccctctttctagcctggggcttgaatttgcatgtctaattcatttactcaccatatttgaattggcctgaacagatgtaaatcgggaaggatgggaaaaactgcagtcatcaacaatgattaatcagctgttgcaggcagtgtcttaaggagactggtaggaggaggcatggaaaccaaaaggccgtgtgtttagaagcctaattgtcacatcaagcatcattgtccccatgcaacaaccaccaccttatacatcacttcctgttttaagcagctctaaaacatagactgaagatttatttttaatatgttgactttatttctgagcaaagcatcggtcatgtgtgtattttttcatagtcccaccttggagcatttatgtagacattgtaaataaattttgtgcaaaaaggactggaaaaatgaactgtattattgcaatttttttttgtaaaagtagcagtttggtatgagttggcatgcatacaagatttactaagtgggataagctaattatactttttgttgtggataaacaaatgcttgttgatagcctttttctatcaagaaaccaaggagctaattattaataacaatcattgcacactgagtcttagcgtttctgatggaaacagtttggattgtataataacgccaagcccagttgtagtcgtttgagtgcagtaatgaaatctgaatctaaaataaaaacaagattatttttgtcatgctgactccac

SEQ ID NO: 71 - DNA, 2925 bp, Homo sapien
tccgggggagtttgaatatttgtttcttttcacactggccttaaagaggatatattagaagttgaagtaggaagggagccagagaggccgatggcgcaaaggtacgacgatctaccccattacgggggcatggatggagtaggcatcccctccacgatgtatggggacccgcatgcagccaggtccatgcagccggtccaccacctgaaccacgggcctcctctgcactcgcatcagtacccgcacacagctcataccaacgccatggcccccagcatgggctcctctgtcaatgacgctttaaagagagataaagatgccatttatgggtaggtacaatgggcagcaggttaagtagttgagactcaacgcttccctccttctctgtgcccttggtaagaggaaagtcagagttctctggattggagacaccccctcttccctctcttagcactgatttttgagaaatgtgaattagctacttgtaccccccgcgagccgggggtggcgggcggggacgtctgctcgtcagagtcattcaatgaagatatagccgtgttcgccaaacagattcgcgcagaaaaacctctattttcttctaatccagaactggataacttgatgattcaagccatacaagtattaaggtttcatctattggaattagagaaggtacacgaattatgtgacaatttctgccaccggtatattagctgtttgaaagggaaaatgcctatcgatttggtgatagacgatagagaaggaggatcaaaatcagacagtgaagatataacaagatcagcaaatctaactgaccagccctcttggaacagagatcatgatgacacggcatctactcgttcaggaggaaccccaggcccttccagcggtggccacacgtcacacagtggggacaacagcagtgagcaaggtgatggcttggacaacagtgtagcttcccccagcacaggtgacgatgatgaccctgataaggacaaaaagcgtcacaaaaagcgtggcatctttcccaaagtagccacaaatatcatgagggcgtggctgttccagcatctaacacacccttacccttctgaagaacagaaaaagcagttggcacaagacacgggactcaccatccttcaagtgaacaattggtttattaatgcccggagaagaatagtgcagcccatgatagaccagtccaaccgagcagtaagtcaaggaacaccttataatcctgatggacagcccatgggaggtttcgtaatggacggtcagcaacatatgggaattagagcaccaggacctatgagtggaatgggcatgaatatgggcatggaggggcagtggcactacatgtaaccttcatctagttaaccaatcgcaaagcaagggggaaggctgcaaagtatgccaggggagtatgtagcccggggtggtccaatgggtgtgagtatgggacagccaagttatacccaaccccagatgcccccccatcctgctcagctgcgtcatgggccccccatgcatacgtacattcctggacaccctcaccacccaacagtgatgatgcatggaggaccgccccaccctggaatgccaatgtcagcatcaagccccacagttcttaatacaggagacccaacaatgagtggacaagtcatggacattcatgctcagtagcttaagggaatatgcattgtctgcaatggtgactgatttcaaatcatgttttttctgcaatgactgtggagttccattcttggcatctactctggaccaaggagcatccctaattcttcatagggacctttaaaaagcaggaaataccaactgaagtcaatttgggggacatgctaaataactatataagacattaagagaacaaagagtgaaatattgtaaatgctattatactgttatccatattacgttgtttcttatagattttttaaaaaaaatgtgaaatttttccacactatgtgtgttgtttccatagctcttcacttcctccagaagcctccttacattaaaaagccttacagttatcctgcaagggacaggaaggtctgatttgcaggatttttagagcattaaaataactatcaggcagaagaatctttcttctcgcctaggatttcagccatgcgcgcgctctctctctttctctctcttttcctctctctccctctttctagcctggggcttgaatttgcatgtctaattcatttactcaccatatttgaattggcctgaacagatgtaaatcgggaaggatgggaaaaactgcagtcatcaacaatgattaatcagctgttgcaggcagtgtcttaaggagactggtaggaggaggcatggaaaccaaaaggccgtgtgtttagaagcctaattgtcacatcaagcatcattgtccccatgcaacaaccaccaccttatacatcacttcctgttttaagcagctctaaaacatagactgaagatttatttttaatatgttgactttatttctgagcaaagcatcggtcatgtgtgtattttttcatagtcccaccttggagcatttatgtagacattgtaaataaattttgtgcaaaaaggactggaaaaatgaactgtattattgcaatttttttttgtaaaagtagcagtttggtatgagttggcatgcatacaagatttactaagtgggataagctaattatactttttgttgtggataaacaaatgcttgttgatagcctttttctatcaagaaaccaaggagctaattattaataacaatcattgcacactgagtcttagcgtttctgatggaaacagtttggattgtataataacgccaagcccagttgtagtcgtttgagtgcagtaatgaaatctgaatctaaaataaaaacaagattatttttgtcatgctgactccac

SEQ ID NO: 72 - DNA, 2694 bp, Homo sapien
aaactttgcaatgggaaaagccacagtttgagggccatttggaatatttttctgtccactccttccaaggacacatgtagtccagtgttgtggcccttttggggtggggtggggccagtgggactgagaaaggggagagccatgggggaggagggtgtttatgatcctcacttagatgctgtgttgttgttttagctagttttttttttcttaagaaatataaacctctagatggtacccagttgctgctattaagttttagtgttattgccataaatcaaaataactctatttactggtgggagggggtgggctggagatggtagagctgtggcagccagttttctgcaagccaggaatggggtgcttattgtttttgtatctttgcagatgattcaagccatacaagtattaaggtttcatctattggaattagagaaggtacacgaattatgtgacaatttctgccaccggtatattagctgtttgaaagggaaaatgcctatcgatttggtgatagacgatagagaaggaggatcaaaatcagacagtgaagatataacaagatcagcaaatctaactgaccagccctcttggaacagagatcatgatgacacggcatctactcgttcaggaggaaccccaggcccttccagcggtggccacacgtcacacagtggggacaacagcagtgagcaaggtgatggcttggacaacagtgtagcttcccccagcacaggtgacgatgatgaccctgataaggacaaaaagcgtcacaaaaagcgtggcatctttcccaaagtagccacaaatatcatgagggcgtggctgttccagcatctaacacacccttacccttctgaagaacagaaaaagcagttggcacaagacacgggactcaccatccttcaagtgaacaattggtttattaatgcccggagaagaatagtgcagcccatgatagaccagtccaaccgagcagtaagtcaaggaacaccttataatcctgatggacagcccatgggaggtttcgtaatggacggtcagcaacatatgggaattagagcaccaggacctatgagtggaatgggcatgaatatgggcatggaggggcagtggcactacatgtaaccttcatctagttaaccaatcgcaaagcaagggggaaggctgcaaagtatgccaggggagtatgtagcccggggtggtccaatgggtgtgagtatgggacagccaagttatacccaaccccagatgcccccccatcctgctcagctgcgtcatgggccccccatgcatacgtacattcctggacaccctcaccacccaacagtgatgatgcatggaggaccgccccaccctggaatgccaatgtcagcatcaagccccacagttcttaatacaggagacccaacaatgagtggacaagtcatggacattcatgctcagtagcttaagggaatatgcattgtctgcaatggtgactgatttcaaatcatgttttttctgcaatgactgtggagttccattcttggcatctactctggaccaaggagcatccctaattcttcatagggacctttaaaaagcaggaaataccaactgaagtcaatttgggggacatgctaaataactatataagacattaagagaacaaagagtgaaatattgtaaatgctattatactgttatccatattacgttgtttcttatagattttttaaaaaaaatgtgaaatttttccacactatgtgtgttgtttccatagctcttcacttcctccagaagcctccttacattaaaaagccttacagttatcctgcaagggacaggaaggtctgatttgcaggatttttagagcattaaaataactatcaggcagaagaatctttcttctcgcctaggatttcagccatgcgcgcgctctctctctttctctctcttttcctctctctccctctttctagcctggggcttgaatttgcatgtctaattcatttactcaccatatttgaattggcctgaacagatgtaaatcgggaaggatgggaaaaactgcagtcatcaacaatgattaatcagctgttgcaggcagtgtcttaaggagactggtaggaggaggcatggaaaccaaaaggccgtgtgtttagaagcctaattgtcacatcaagcatcattgtccccatgcaacaaccaccaccttatacatcacttcctgttttaagcagctctaaaacatagactgaagatttatttttaatatgttgactttatttctgagcaaagcatcggtcatgtgtgtattttttcatagtcccaccttggagcatttatgtagacattgtaaataaattttgtgcaaaaaggactggaaaaatgaactgtattattgcaatttttttttgtaaaagtagcagtttggtatgagttggcatgcatacaagatttactaagtgggataagctaattatactttttgttgtggataaacaaatgcttgttgatagcctttttctatcaagaaaccaaggagctaattattaataacaatcattgcacactgagtcttagcgtttctgatggaaacagtttggattgtataataacgccaagcccagttgtagtcgtttgagtgcagtaatgaaatctgaatctaaaataaaaacaagattatttttgtcatgctgactccac

SEQ ID NO: 73 - DNA, 2201 bp, Homo sapien
aagaagttctttagacctgactgctcttgagcctaggccttgttctttctctgtcttggaaaacaaaacacaacaaaaaaacagtaccaaagaaactattaatcatttaaatttgctcttttggttttgtttatatccaaaggcattctatttgaataaagcatgtcaaggtagcatcagtcaaaatttgattcgctatgtttgcaggtgatggcttggacaacagtgtagcttcccccagcacaggtgacgatgatgaccctgataaggacaaaaagcgtcacaaaaagcgtggcatctttcccaaagtagccacaaatatcatgagggcgtggctgttccagcatctaacacacccttacccttctgaagaacagaaaaagcagttggcacaagacacgggactcaccatccttcaagtgaacaattggtttattaatgcccggagaagaatagtgcagcccatgatagaccagtccaaccgagcagtaagtcaaggaacaccttataatcctgatggacagcccatgggaggtttcgtaatggacggtcagcaacatatgggaattagagcaccaggacctatgagtggaatgggcatgaatatgggcatggaggggcagtggcactacatgtaaccttcatctagttaaccaatcgcaaagcaagggggaaggctgcaaagtatgccaggggagtatgtagcccggggtggtccaatgggtgtgagtatgggacagccaagttatacccaaccccagatgcccccccatcctgctcagctgcgtcatgggccccccatgcatacgtacattcctggacaccctcaccacccaacagtgatgatgcatggaggaccgccccaccctggaatgccaatgtcagcatcaagccccacagttcttaatacaggagacccaacaatgagtggacaagtcatggacattcatgctcagtagcttaagggaatatgcattgtctgcaatggtgactgatttcaaatcatgttttttctgcaatgactgtggagttccattcttggcatctactctggaccaaggagcatccctaattcttcatagggacctttaaaaagcaggaaataccaactgaagtcaatttgggggacatgctaaataactatataagacattaagagaacaaagagtgaaatattgtaaatgctattatactgttatccatattacgttgtttcttatagattttttaaaaaaaatgtgaaatttttccacactatgtgtgttgtttccatagctcttcacttcctccagaagcctccttacattaaaaagccttacagttatcctgcaagggacaggaaggtctgatttgcaggatttttagagcattaaaataactatcaggcagaagaatctttcttctcgcctaggatttcagccatgcgcgcgctctctctctttctctctcttttcctctctctccctctttctagcctggggcttgaatttgcatgtctaattcatttactcaccatatttgaattggcctgaacagatgtaaatcgggaaggatgggaaaaactgcagtcatcaacaatgattaatcagctgttgcaggcagtgtcttaaggagactggtaggaggaggcatggaaaccaaaaggccgtgtgtttagaagcctaattgtcacatcaagcatcattgtccccatgcaacaaccaccaccttatacatcacttcctgttttaagcagctctaaaacatagactgaagatttatttttaatatgttgactttatttctgagcaaagcatcggtcatgtgtgtattttttcatagtcccaccttggagcatttatgtagacattgtaaataaattttgtgcaaaaaggactggaaaaatgaactgtattattgcaatttttttttgtaaaagtagcagtttggtatgagttggcatgcatacaagatttactaagtgggataagctaattatactttttgttgtggataaacaaatgcttgttgatagcctttttctatcaagaaaccaaggagctaattattaataacaatcattgcacactgagtcttagcgtttctgatggaaacagtttggattgtataataacgccaagcccagttgtagtcgtttgagtgcagtaatgaaatctgaatctaaaataaaaacaagattatttttgtcatgctgactccac

SEQ ID NO: 74 - DNA, 3805 bp, Homo sapien
tccgggggagtttgaatatttgtttcttttcacactggccttaaagaggatatattagaagttgaagtaggaagggagccagagaggccgatggcgcaaaggtacgacgatctaccccattacgggggcatggatggagtaggcatcccctccacgatgtatggggacccgcatgcagccaggtccatgcagccggtccaccacctgaaccacgggcctcctctgcactcgcatcagtacccgcacacagctcataccaacgccatggcccccagcatgggctcctctgtcaatgacgctttaaagagagataaagatgccatttatgggtaggtacaatgggcagcaggttaagtagttgagactcaacgcttccctccttctctgtgcccttggtaagaggaaagtcagagttctctggattggaggtacatctttggtgacttttcattcacatttcatggataatttggggaggtggcctgccatccctgaagccctacatccccatacacactctgtgcacatccagtgccctgctccaccatggcagtgcccgcaagggggtcccagatgagaagaagctggctaaagggcccttgtcccctctcagactccttcagcgggctggagtcctccctcgctcgatttcgcccgagagcgttaggggtttctaaatgcaggcgcctttgtgttgtaacgaaacttttagtttaagggaaaatctcttttaagccactgattgttctgacttgctgagtttactcagcagccttatgctggctctgccactgcacaataaaaccaaagcaggacagttgcaggtcaagcaagggggaacatgttttgcatttagggagtttgaccactgaagtcaaggagaggagcttgctctgaattgttacacacattaagaaacttctagatgttttagcactttgtgctcaaaggcgaaacctgcaggatttagaaataagtaaattcggggtgctcttcctcggaggttgttttctggctgcggtttatactgctttctcctccgccattcgattagaccctgggctagtagaatcctttgaaactcacttgtgcctactgtgtgccgatgaatttgggaacctctttttactttgcagaaacttttatttctatttatttatttttaaaaaatcaggacacactgaccctccctcgctggaaaaaaaaatatatataatctttttattttattttctgatcccttgtgcgatgggcttgtttaattcccaccgttctgtccgcagagttaactacaagtggtttaggctctgggacagaacatttggggaagctttgtaaaggaccccaaactgttaaattcccagctgagctgtgagagctaataaaagacttgagatacctccttgggcattagaagaagcttttctttctttcttcttcttcttcttttttttttttttttcttttttatgggctgagacaagcgacatctaggcccctcgcaatactagctgctttgccacttcgcagagacaaaatgaaaggctctactgcaggaacatttgaaggaactttctttggggggcggtgggggctatcagcgaagggaggggaatgtgcgtggagctgaggaggagcctcccggctctccgagggccttggggttgggatccctaggtgcagcccgttgacagtcggccccacggccatggacgtcctttccccaagttagctgagcgcctgccaccgagatcccccgagcctgggcttcgcgcggccgcctaggaggaacccgcaggaaccagccctccccaactctccgcccggcgcctttctcctccaccggatcctggatgtgcagtggaggggacgagggcttgtcgggtgggaaacttaattcaaaatggctgctggaaacgcttgggttttattcgtagcaaatgttgccaatttctccggccagatacgctaaaccgatcctcagataccgtccatggctcagggcctccgacttcagggctccaggaggaaggggagacaccccctcttccctctcttagcactgatttttgagaaatgtgaattagctacttgtaccccccgcgagccgggggtggcgggcggggacgtctgctcgtcagagtcattcaatgaagatatagccgtgttcgccaaacagattcgcgcagaaaaacctctattttcttctaatccagaactggataacttgatgattcaagccatacaagtattaaggtttcatctattggaattagagaaggtacacgaattatgtgacaatttctgccaccggtatattagctgtttgaaagggaaaatgcctatcgatttggtgatagacgatagagaaggaggatcaaaatcagacagtgaagatataacaagatcagcaaatctaactgaccagccctcttggaacagagatcatgatgacacggcatctactcgttcaggaggaaccccaggcccttccagcggtggccacacgtcacacagtggggacaacagcagtgagcaaggtgatggcttggacaacagtgtagcttcccccagcacaggtgacgatgatgaccctgataaggacaaaaagcgtcacaaaaagcgtggcatctttcccaaagtagccacaaatatcatgagggcgtggctgttccagcatctaacacacccttacccttctgaagaacagaaaaagcagttggcacaagacacgggactcaccatccttcaagtgaacaattggtttattaatgcccggagaagaatagtgcagcccatgatagaccagtccaaccgagcagtaagtcaaggaacaccttataatcctgatggacagcccatgggaggtttcgtaatggacggtcagcaacatatgggaattagagcaccaggacctatgagtggaatgggcatgaatatgggcatggaggggcagtggcactacatgtaaccttcatctagttaaccaatcgcaaagcaagggggaaggctgcaaagtatgccaggggagtatgtagcccggggtggtccaatgggtgtgagtatgggacagccaagttatacccaaccccagatgcccccccatcctgctcagctgcgtcatgggccccccatgcatacgtacattcctggacaccctcaccacccaacagtgatgatgcatggaggaccgccccaccctggaatgccaatgtcagcatcaagccccacagttcttaatacaggagacccaacaatgagtggacaagtcatggacattcatgctcagtagcttaagggaatatgcattgtctgcaatggtgactgatttcaaatcatgttttttctgcaatgactgtggagttccattcttggcatctactctggaccaaggagcatccctaattcttcatagggacctttaaaaagcaggaaataccaactgaagtcaatttgggggacatgctaaataactatataagacattaagagaacaaagagtgaaatattgtaaatgctattatactgttatccatattacgttgtttcttatagatttactaagtgggataagctaattatactttttgttgtggataaacaaatgcttgttgatagcctttttctatcaagaaaccaaggagctaattattaataacaatcattgcacactgagtcttagcgtttctgatggaaacagtttggattgtataataacgccaagcccagttgtagtcgtttgagtgcagtaatgaaatctgaatctaaaataaaaacaagattatttttgtcatgctgactccac

SEQ ID NO: 75 - DNA, 3755 bp, Homo sapien
tccgggggagtttgaatatttgtttcttttcacactggccttaaagaggatatattagaagttgaagtaggaagggagccagagaggccgatggcgcaaaggtacgacgatctaccccattacgggggcatggatggagtaggcatcccctccacgatgtatggggacccgcatgcagccaggtccatgcagccggtccaccacctgaaccacgggcctcctctgcactcgcatcagtacccgcacacagctcataccaacgccatggcccccagcatgggctcctctgtcaatgacgctttaaagagagataaagatgccatttatgggtaggtacaatgggcagcaggttaagtagttgagactcaacgcttccctccttctctgtgcccttggtaagaggaaagtcagagttctctggattggaggtacatctttggtgacttttcattcacatttcatggataatttggggaggtggcctgccatccctgaagccctacatccccatacacactctgtgcacatccagtgccctgctccaccatggcagtgcccgcaagggggtcccagatgagaagaagctggctaaagggcccttgtcccctctcagactccttcagcgggctggagtcctccctcgctcgatttcgcccgagagcgttaggggtttctaaatgcaggcgcctttgtgttgtaacgaaacttttagtttaagggaaaatctcttttaagccactgattgttctgacttgctgagtttactcagcagccttatgctggctctgccactgcacaataaaaccaaagcaggacagttgcaggtcaagcaagggggaacatgttttgcatttagggagtttgaccactgaagtcaaggagaggagcttgctctgaattgttacacacattaagaaacttctagatgttttagcactttgtgctcaaaggcgaaacctgcaggatttagaaataagtaaattcggggtgctcttcctcggaggttgttttctggctgcggtttatactgctttctcctccgccattcgattagaccctgggctagtagaatcctttgaaactcacttgtgcctactgtgtgccgatgaatttgggaacctctttttactttgcagaaacttttatttctatttatttatttttaaaaaatcaggacacactgaccctccctcgctggaaaaaaaaatatatataatctttttattttattttctgatcccttgtgcgatgggcttgtttaattcccaccgttctgtccgcagagttaactacaagtggtttaggctctgggacagaacatttggggaagctttgtaaaggaccccaaactgttaaattcccagctgagctgtgagagctaataaaagacttgagatacctccttgggcattagaagaagcttttctttctttcttcttcttcttcttttttttttttttttcttttttatgggctgagacaagcgacatctaggcccctcgcaatactagctgctttgccacttcgcagagacaaaatgaaaggctctactgcaggaacatttgaaggaactttctttggggggcggtgggggctatcagcgaagggaggggaatgtgcgtggagctgaggaggagcctcccggctctccgagggccttggggttgggatccctaggtgcagcccgttgacagtcggccccacggccatggacgtcctttccccaagttagctgagcgcctgccaccgagatcccccgagcctgggcttcgcgcggccgcctaggaggaacccgcaggaaccagccctccccaactctccgcccggcgcctttctcctccaccggatcctggatgtgcagtggaggggacgagggcttgtcgggtgggaaacttaattcaaaatggctgctggaaacgcttgggttttattcgtagcaaatgttgccaatttctccggccagatacgctaaaccgatcctcagataccgtccatggctcagggcctccgacttcagggctccaggaggaaggggagacaccccctcttccctctcttagcactgatttttgagaaatgtgaattagctacttgtaccccccgcgagccgggggtggcgggcggggacgtctgctcgtcagagtcattcaatgaagatatagccgtgttcgccaaacagattcgcgcagaaaaacctctattttcttctaatccagaactggataacttgatgattcaagccatacaagtattaaggtttcatctattggaattagagaaggtacacgaattatgtgacaatttctgccaccggtatattagctgtttgaaagggaaaatgcctatcgatttggtgatagacgatagagaaggaggatcaaaatcagacagtgaagatataacaagatcagcaaatctaactgaccagccctcttggaacagagatcatgatgacacggcatctactcgttcaggaggaaccccaggcccttccagcggtggccacacgtcacacagtggggacaacagcagtgagcaaggtgatggcttggacaacagtgtagcttcccccagcacaggtgacgatgatgaccctgataaggacaaaaagcgtcacaaaaagcgtggcatctttcccaaagtagccacaaatatcatgagggcgtggctgttccagcatctaacacacccttacccttctgaagaacagaaaaagcagttggcacaagacacgggactcaccatccttcaagtgaacaattggtttattaatgcccggagaagaatagtgcagcccatgatagaccagtccaaccgagcagtaagtcaaggaacaccttataatcctgatggacagcccatgggaggtttcgtaatggacggtcagcaacatatgggaattagagcaccaggtaagactttgtttttgtggtagttcctcatttttgactccaagagtgtcatcccctcatcaacacaggtaaatccgcctcatccttttctgttatctcaagctggctgccttgccttgtctgctatctgtgcatctaagatattgcagaggggaagccaggatctttatgcactgaagatctcactatttctcaaccctctagatcctgttttttttttaagggtcttttggcactatctgttgactttgctcattttctggcctcttcttggatttttatctcccttctaggacctatgagtggaatgggcatgaatatgggcatggaggggcagtggcactacatgtaaccttcatctagttaaccaatcgcaaagcaagggggaagtaagtacaaatggggtctttgttttcactttgtcctaggaatatttttcctcttgcattttcttatgttctccttgcccatagcttcatgcttgttcattcctttccattaaactcctggtttcttgcttccatcattttctttttggttgtgatcaagcttttaagcttataaatactgtgtatgatgtacatttatcctgtgtgttgctattgtacagtactgaccacatgacaaaacaagaaacagtcaggaggtgggggagtgggttgtcatagcaacagactgatttgcaaaatgtaagcagtctgcagcagtgcaaggagaggaaagagcatgtccccaaagtgtcataaatctgtctaaccgcagttgatgcatgagttacatttctacactaacctgcaagacaccgaaaagctaaacagagacttcttttaggtaaaataaaca

SEQ ID NO: 76 - DNA, 3343 bp, Homo sapien
tccgggggagtttgaatatttgtttcttttcacactggccttaaagaggatatattagaagttgaagtaggaagggagccagagaggccgatggcgcaaaggtacgacgatctaccccattacgggggcatggatggagtaggcatcccctccacgatgtatggggacccgcatgcagccaggtccatgcagccggtccaccacctgaaccacgggcctcctctgcactcgcatcagtacccgcacacagctcataccaacgccatggcccccagcatgggctcctctgtcaatgacgctttaaagagagataaagatgccatttatgggtaggtacaatgggcagcaggttaagtagttgagactcaacgcttccctccttctctgtgcccttggtaagaggaaagtcagagttctctggattggaggtacatctttggtgacttttcattcacatttcatggataatttggggaggtggcctgccatccctgaagccctacatccccatacacactctgtgcacatccagtgccctgctccaccatggcagtgcccgcaagggggtcccagatgagaagaagctggctaaagggcccttgtcccctctcagactccttcagcgggctggagtcctccctcgctcgatttcgcccgagagcgttaggggtttctaaatgcaggcgcctttgtgttgtaacgaaacttttagtttaagggaaaatctcttttaagccactgattgttctgacttgctgagtttactcagcagccttatgctggctctgccactgcacaataaaaccaaagcaggacagttgcaggtcaagcaagggggaacatgttttgcatttagggagtttgaccactgaagtcaaggagaggagcttgctctgaattgttacacacattaagaaacttctagatgttttagcactttgtgctcaaaggcgaaacctgcaggatttagaaataagtaaattcggggtgctcttcctcggaggttgttttctggctgcggtttatactgctttctcctccgccattcgattagaccctgggctagtagaatcctttgaaactcacttgtgcctactgtgtgccgatgaatttgggaacctctttttactttgcagaaacttttatttctatttatttatttttaaaaaatcaggacacactgaccctccctcgctggaaaaaaaaatatatataatctttttattttattttctgatcccttgtgcgatgggcttgtttaattcccaccgttctgtccgcagagttaactacaagtggtttaggctctgggacagaacatttggggaagctttgtaaaggaccccaaactgttaaattcccagctgagctgtgagagctaataaaagacttgagatacctccttgggcattagaagaagcttttctttctttcttcttcttcttcttttttttttttttttcttttttatgggctgagacaagcgacatctaggcccctcgcaatactagctgctttgccacttcgcagagacaaaatgaaaggctctactgcaggaacatttgaaggaactttctttggggggcggtgggggctatcagcgaagggaggggaatgtgcgtggagctgaggaggagcctcccggctctccgagggccttggggttgggatccctaggtgcagcccgttgacagtcggccccacggccatggacgtcctttccccaagttagctgagcgcctgccaccgagatcccccgagcctgggcttcgcgcggccgcctaggaggaacccgcaggaaccagccctccccaactctccgcccggcgcctttctcctccaccggatcctggatgtgcagtggaggggacgagggcttgtcgggtgggaaacttaattcaaaatggctgctggaaacgcttgggttttattcgtagcaaatgttgccaatttctccggccagatacgctaaaccgatcctcagataccgtccatggctcagggcctccgacttcagggctccaggaggaaggggagacaccccctcttccctctcttagcactgatttttgagaaatgtgaattagctacttgtaccccccgcgagccgggggtggcgggcggggacgtctgctcgtcagagtcattcaatgaagatatagccgtgttcgccaaacagattcgcgcagaaaaacctctattttcttctaatccagaactggataacttgatgattcaagccatacaagtattaaggtttcatctattggaattagagaaggtacacgaattatgtgacaatttctgccaccggtatattagctgtttgaaagggaaaatgcctatcgatttggtgatagacgatagagaaggaggatcaaaatcagacagtgaagatataacaagatcagcaaatctaactgaccagccctcttggaacagagatcatgatgacacggcatctactcgttcaggaggaaccccaggcccttccagcggtggccacacgtcacacagtggggacaacagcagtgagcaaggtgatggcttggacaacagtgtagcttcccccagcacaggtgacgatgatgaccctgataaggacaaaaagcgtcacaaaaagcgtggcatctttcccaaagtagccacaaatatcatgagggcgtggctgttccagcatctaacacacccttacccttctgaagaacagaaaaagcagttggcacaagacacgggactcaccatccttcaagtgaacaattggtaagtaatttggctttgtgtttacacacaatctgtttccccctctggcaacctgcagctcatgttttgcattaagaagacacacccagttgccactgctttccctggtggcttgttgattcaaaagtgaaaacaaactgttgactgatatgtgagaacatttgctagtatgggaaataaaacattgtattgtcttctacctcctttataagttgacaattttatgcatagtataagtatgtgtgtaattcacattcactatggctctgtcaatgtatctctctctatggctttttttttcccccttcagggtaatcgatagagtagtatcatcctattttctacaaaacaagaaaatccaccatcacatatcagtcaggtttaaattcattgaataactaaattcagttagattttgttagggctatgcattcaaggatagcctctcctttgctcttatctcctgaatactgaaaggaagaaattatttgtttctctttgaggctattccaaacctgaggcatctcgtggctgtgcaatactgtttctaaataaagtgtaaattcctgatttggggcga

SEQ ID NO: 77 - DNA, 396 bp, Homo sapien
agcgagcgctagggctttgtgcatttgaatattaacatttgaggtgttctgaccagaagaagacagagcggatgatcattcattcaccacgttgacaacctcgcctgtgattgacagctggagtggcagaaagccatgagatttggtagttgggtctgaggggcgctcttttttttccttttctttctttctttctttttttttttttaaactgatttttgggggagagaagatctgcttttttttgcccccgctgctgtcttggaaacggagcgcttttatgctcagtgactcgggcgctttgcttcaggtcccgtagaccgaagatctgggaccagtagctcacgttgctggagacgttaagggatttttcgtcgggccttttttttttttttt

SEQ ID NO: 78 - DNA, 639 bp, Homo sapien
ctgtgaggactaaacaagtaatatgtacaaagctttatacagtatatgcaagtgagtgcaatagagcaccaggcactattctaatgatttattatacaaataaaaataagatgaatcaataaaggacctggggaatagaggtatcctttaacacaatcaaagcaacagttcctagtatctatagtatgctttcatagccactatgttatttaatcttctaatggaaacccaagaaaaacagaatcccatgatgtaaaactgagacctaaattctaagaaaggcctgagagccctcctttcttaaaggtttcctttaaaataaaagaaaaaaaaaggccctggttaaagggaagcaccaaatgaataaccacttgttctttttctagctcaagtctttgcctatccagccaagttcttctcaacacagcacatcctccccacgtgccatctcgaggagatggtcagtgcaaaggccagagccaacatctagcaccagaacagcatgggccaaaggacaggaaaagggagacttgggccaagtttacaggttactttccacccaagtgagaaggactccactcagcaactgttaacagtgccagcacctggagttcagactagaagctcttgtaagttcct

SEQ ID NO: 79 - DNA, 979 bp, Homo sapien
ctcctagggctgctgtgaggactaaacaagtaatatgtacaaagctttatacagtatatgcaagtgagtgcaatagagcaccaggcactattctaatgatttattatacaaataaaaataagatgaatcaataaaggacctggggaatagaggtatcctttaacacaatcaaagcaacagttcctagtatctatagtatgctttcatagccactatgttatttaatcttctaatggaaacccaagaaaaacagaatcccatgatgtaaaactgagacctaaattctaagaaaggcctgagagccctcctttcttaaaggtttcctttaaaataaaagaaaaaaaaaggccctggttaaagggaagcaccaaatgaataaccacttgttctttttctagctcaagtctttgcctatccagccaagttcttctcaacacagcacatcctccccacgtgccatctcgaggagatggtcagtgcaaaggccagagccaacatctagcaccagaacagcatgggccaaaggacaggaaaagggagacttgggccaagtttacaggttactttccacccaagtgagaaggactccactcagcaactgttaacagtgccagcacctggagttcagactagaagctcttgtaagttcctgttcctcacatgccccagtttgccttggaaagaagaagccttttaggaagtgaagcgtttgctgaacagtcagctggttactataggtcaaacgttctgtatctgctaatccaatccaatcccaaaagatccacaaagacttccggtaggtgtcttcctagttcccgccttggatcacaggtggtccaaacagctcctcttggtcctccttcacaatcttcaaatcccctgaagggccatcattgtgggtaccacctaccatcacaactatccaggctcagtcactgtcaatcttcctcccacgcacacatcctccatgtatgaggcc

SEQ ID NO: 80 - DNA, 818 bp, Homo sapien
cctttattggtttggaagttacacattatagttctgggcttgtttaaatggagaccttagaaatttcagcatgcattcttaaaatctaaagttaaccagttaaggactttggagcatttaaggctgataactcctacttgatttaacaataatttgccaaataactttggttctcatgttttcttatagccttacacactctcactattttctaccattcttatcttattaaaagataacgtctgtatatgcttacatttattcacttaattactactgccttttcttaccatttctttcacatatcaaagattccttttgatatcactgtagttcttgaagcttgtcattgacaagtttctttcatgagaagattatttgacaatgaagtctctctatgtgtctgaaggaaacttatttatagaagatagttatgttgaaaatgattgtaggtttatactttttcctggaacttgaaaggtggtatttgattgacagttggcttctgactgttgaggagtcaactctcattataaccatgtcagctctttgtatgcagtctctcttcctaaatcctttcaagtcttcttctctgtctttggtgtggtgtcatctcactgtgatccatccaggtactggtttatgtttcactttttcctgcttcggattcattgtgcctcctgaatatgaggatttgagaattttgtcaaccctggaaaaccctcaaccattagctcttaaaagttgaaaagtaaatgaagtcatccagcattgttaggtattcttcagtggaatgtttgttcaaaatgtcaagttag

SEQ ID NO: 81 - DNA, 930 bp, Homo sapien
gcccacgagtcacaacacctgcaacttcaggcttgggtgacaaaagcgagaacaactgtccaaaaaaaaaaaaggaatgatgtttatttatttattttaatcaggtttttaccctttattggtttggaagttacacattatagttctgggcttgtttaaatggagaccttagaaatttcagcatgcattcttaaaatctaaagttaaccagttaaggactttggagcatttaaggctgataactcctacttgatttaacaataatttgccaaataactttggttctcatgttttcttatagccttacacactctcactattttctaccattcttatcttattaaaagataacgtctgtatatgcttacatttattcacttaattactactgccttttcttaccatttctttcacatatcaaagattccttttgatatcactgtagttcttgaagcttgtcattgacaagtttctttcatgagaagattatttgacaatgaagtctctctatgtgtctgaaggaaacttatttatagaagatagttatgttgaaaatgattgtaggtttatactttttcctggaacttgaaaggtggtatttgattgacagttggcttctgactgttgaggagtcaactctcattataaccatgtcagctctttgtatgcagtctctcttcctaaatcctttcaagtcttcttctctgtctttggtgtggtgtcatctcactgtgatccatccaggtactggtttatgtttcactttttcctgcttcggattcattgtgcctcctgaatatgaggatttgagaattttgtcaaccctggaaaaccctcaaccattagctcttaaaagttgaaaagtaaatgaagtcatccagcattgttaggtattcttcagtggaatgtttgttcaaaatgtcaagttag

SEQ ID NO: 82 - DNA, 539 bp, Homo sapien
gccttttctaaccatttctttcacatatcaaagattccttttgatatcactgttgttcttgaagcttgtcattgacaagtttctttcatgagaagatttttgacaatgaagtctctttatgtgtctgaaggaaacttatttatagaagatagttttgttgaaaatgattgtaggtttatactttttcctggaacttgaaaggtggtatttgattgacagttggcttctgactgttgaggagtcaactctcattataaccatgtcagctctttgtatgcagtctctcttcctaaatcctttcaagtcttcttctctgtctttggtgtggtgtcatctcactgtgatccatccaggtactggtttatgtttcactttttcctgcttcggattcattgtgcctcctgaatatgaggatttgagaattttgtcaaccctggaaaaccctcaaccattagctcttaaaagttgaaaagtaaatgaagtcatccagcattgttaggtattcttcagtggaatgtttgttcaaaatgtcaagttag

SEQ ID NO: 83 - DNA, 555 bp, Homo sapien
atgcattcttaaaaatctaaagattaaccagttacggactttggagcatttcaaggctgactaactcacatacttgatttaacaataatttgccaaataactttggttctcatgttttcttatagccttacacactctcactattttctaccattcttatcttattaaaagataacgtctgtatatgcttacatttattcacttaattactactgccttttcttaccatttctttcacatatcaaagattccttttgatatcactgtagttcttgaagcttgtcattgacaagtttctttcatgagaagattatttgacaatgaagtctctctatgtgtctgaaggaaacttatttatagaagatagttatgttgaaaatgattgtaggtttatactttttcctggaacttgaaaggtggtatttgattgaccagttggcttctgactgttgaagagtcaactctcattataaccatgtcagctcttatgtatgcagtctctcttcctaaatcctttcaagtcttcttctcttgtctttggtgtggtgtcatctc

SEQ ID NO: 84 - DNA, 767 bp, Homo sapien
gtcaactcaagagattagtgcaaggaatggaatgttcaagctgaaattcttatcttatgcctttatttgttgtttcttttttgggttccgtattccatctgtgttatattggtcttttctttatcttggggataccactcaaactcctcctaccccatcctctaaggtgtgaagtgactataaaatcaataattaacctatgagaaagtgaatggatatatcaaaataccagtcgtggggaaggaggcacagtgtttgccttataaaatttctcaggtctcaacctgacaaattttgtacaaataattttgtttctgggtttttttcaccactccttatttggaagcatagacccagaaatatctacagtagatttccctgcttgatggaggaacttatggaagtattacagccaccatagttcctttccccctttacccacttttgttgttgttattgtttgaactgttggggtctcattaacctcttgagtctagtcttcgcaaccctatatgaaagaagaactcaatctaggctgagatggcagacactttatcattccctgctttggtgctcctaattccagagactcatacttaatgaattaagcctgagtgagtgcccatccacaatattacaaaatttcaataccatgtctatggtgtttgaatttgtacgtaatttgttttcttcaaggagactctaagacctaatagcaggaactatttcatctaagtaggatcaggcaaggagagctagttctagat

SEQ ID NO: 85 - DNA, 768 bp, Homo sapien
gtcaaactcaagagattagtgcaaggaatggaatgttcaagctgaaattcttatcttatgcctttatttgttgtttcttttttgggttccgtattccatctgtgttatattggtcttttctttatcttggggataccactcaaactcctcctaccccatcctctaaggtgtgaagtgactataaaatcaataattaacctatgagaaagtgaatggatatatcaaaataccagtcgtggggaaggaggcacagtgtttgccttataaaatttctcaggtctcaacctgacaaattttgtacaaataattttgtttctgggtttttttcaccactccttatttggaagcatagacccagaaatatctacagtagatttccctgcttgatggaggaacttatggaagtattacagccaccatagttcctttccccctttacccacttttgttgttgttattgtttgaactgttggggtctcattaacctcttgagtctagtcttcgcaaccctatatgaaagaagaactcaatctaggctgagatggcagacactttatcattccctgctttggtgctcctaattccagagactcatacttaatgaattaagcctgagtgagtgcccatccacaatattacaaaatttcaataccatgtctatggtgtttgaatttgtacgtaatttgttttcttcaaggagactctaagacctaatagcaggaactatttcatctaagtaggatcaggcaaggagagctagttctggaa

SEQ ID NO: 86 - DNA, 3636 bp, Homo sapien
agataacagaggaggaggagtggaggggagtgcgtgtgtgagagcgcgcgagggagtgtgagtgtgtgtgagcgcgggtgtgaggcggtgcgcaggggcgggcggaggcgctgtccggccccggccaggcgccgggcggggagcatgggaaggggctagaactgctcgagccccccagccccctccccgggatccgcgccccccctcccgggagaggggccgccccccccggacggacatgggctcctgaagttgcgccgctgccggtcgggggaagagacctgacaggtaattaaatgtgtattttgtggacctgggcttggctggaatgctcaggggtcctgaagatcctattatagcttccttctgttgaaccattaagaaaagatggcgaaagtcaacataactagagacctcatccgtaggcagatcaaggagcggggtgccctgagctttgagcggcgctaccatgtcactgacccctttatccggcggctgggcctggaagcagagctgcagggtcactcaggatgtgtcaactgtctggagtggaatgagaaaggagacttgctggcctctggttccgatgaccagcacacgattgtgtgggacccgctgcaccacaagaagctgctctccatgcacacgggacacaccgcaaatatcttctctgtcaagttcctgcctcacgctggggaccgcatcttgatcacgggggcagccgactctaaggtgcatgtgcacgacctgacagtaaaggagaccatccacatgtttggagaccacacaaaccgggtgaagcgcatcgccacagcgcccatgtggcccaacacattctggagtgctgctgaggatgggcttatccgccagtatgaccttcgagagaacagcaaacactcggaggtgctgattgacctgacagagtactgtggccagctggtggaggccaagtgcctcactgtcaacccccaggacaacaactgcctggcagttggggccagcgggcccttcgtgaggctctatgacatccgcatgatccataaccacagaaagagcatgaagcagagcccttcagcgggtgtgcacaccttctgtgaccggcagaaaccccttccggacggtgcagcccagtattacgtagcaggtcacctgccagtgaagcttcctgactacaacaaccgtttgagagtgctggttgccacctatgtgaccttcagccccaatggcacagagctactagtcaacatggggggggaacaggtctatttgtttgacttgacttacaagcagcggccgtacaccttcctcttgcctagaaaatgccactcctcgggggaagtccagaatggcaagatgtccaccaacggtgtgtccaacggtgtgtccaatggcctgcaccttcatagcaatggcttccggctgccggagagtaggggacatgtcagcccccaagtagagctaccaccatacctggagcgtgtgaaacagcaagccaatgaggcttttgcctgccagcagtggacccaagccattcagctttacagcaaggctgtgcagagggcccctcacaatgccatgctttatggaaaccgagcagcagcctacatgaagcgcaagtgggatggtgaccactatgatgccctgagggactgcctcaaggccatctccctaaacccatgccacctgaaggcacactttcgcctggcccgctgcctctttgagctcaagtatgtggctgaagccctggagtgcctggacgacttcaaagggaaatttccggagcaggcccacagcagcgcttgtgatgcattgggccgcgacatcacagctgccctcttctctaaaaatgatggtgaggagaagaagggacctggtggcggcgccccagtccgcctccgcagcacgagccgcaaggactccatctcagaggatgaaatggtgctgcgggagcgaagctacgactatcaagtttccgctactgggggccactggcaacaccaccacggatatcaaagaggccaatttctttggcaggagaccaccaacctggtccgtgtgctccaaggggatgagtccattgtcaactgcctgcagccacaccccagctactgcttcctggccaccagtggcatcgatcctgttgtgcggctctggaacccccgaccagagagtgaagacctcacaggccgagtcgtggaagatatggagggtgcttcacaggccaaccagcggcgcatgaatgcagacccgttggaggtgatgctgctcaacatgggctaccggatcacgggcctgagcagtgggggtgccggggcctctgatgatgaggacagctctgagggccaggtgcagtgccggcccagctagaccctccagccctggtccccagcccctgctactggctggaccctctgccctgggcaggaggtcaggggattctgttttggtttgtcttccccaccacccttttttttcatttcccctgttttgtttgttagtttggcgttaggggtggaggttgctacaacttgctggctttcggactctgggctgattgtcccctgactatccccagccctgaaaaaaagagcaggaggggacacccctccatatgcccccccccatctcctgctttcatgtccctggagggctctggcctgcctcaaaaccccttctgcctcaggtggggaggaacaagctgaactgtcttcagggactgtcctgccctttagctggcagcagcaggaggagtgggattcccaattggtaagggctcgccttggcctgttgccactcttgctccctagcctgcaaggctagctcccctgtggtcttcaggaaaggttttgaaaaaggatgggtcccaccctccctccagagccaccagtgttagagcggagcccaaaggaaggatgggagccctggagtgggcaagaccaggccacctgctgaggtcgctgtggagcaccctcgctcctctcctggctactagctctggccctgcacctactctcactggccacctctggaggctctgcctttcccaagggccctggcagagggtggggcactgcaccttaccccacccatccatgccagcacttctgcactacggccattctcctcttgggcgctcctcagcctcactgtgacctttctgccagagctcccagccaggcctactctgctgaggtggcgcttcctgctaagggcccttctctgccctttctgccctccttcccatcccacatgctgagccgccacaaagaccaaagaagtgatggcttttctctgtcccctgctgctctgaggggagaggggtgggtctcctgagccactcagatgggaaagtcccttactcggcccctccctccccagcagccccaagctttacactggatgcagcgatcaacccaccactcaccaggacctctcctaggcctactgacacccggtgtcttagctccagacatgaataccaagtagtcgcgctacatcacttacccccatcgtattccctcccagtgattgcaccttcagctgcttaccttggctccatgaccctcgagctgcaggccctgggggaaacagcagccctcccgttatccgttcccatccactccctcggtccctccc

SEQ ID NO: 87 - DNA, 454 bp, Homo sapien
caagtgagatcatgaatatgaaagtactttatatattgtaagacgctagtcagtttaagtccactttggccactcacatgcacttggaaaatattgaaaatggaaagactggtttacctgttcagttccacttcttggtgttgagttccccaggagaacccctaaccaactctcttcctgtctcttcatttgctcccccagggtcactcaggatgtgtcaactgtctggagtggaatgagaaaggagagtaagtatgagctagagcacctgaagggtgctggggaaggaagtaaggagggtggaacagcaaggctcctcctgagaggatccaaggaaaagattggacccaaatgaaaagagactgctgctgtctgccgttcttcagcttagcccataattttcaacacaattaaacaatctcagatagatggaaagttggatgaccatccaaac

SEQ ID NO: 88 - DNA, 1570 bp, Homo sapien
tgggcctctagatgcatgtcgagcggtggggaggaacaagctgaactgtcttcagggactgtcctgccctttagctggcagcagcaggaggagtgggattcccaattggtaagggctcgccttggcctgttgccactcttgctccctagcctgcaaggctagctcccctgtggtcttcaggaaaggttttgaaaaaggatgggtcccaccctccctccagagccaccagtgttagagcggagcccaaaggaaggatgggagccctggagtgggcaagaccaggccacctgctgaggtcgctgtggagcaccctcgctcctctcctggctactagctctggccctgcacctactctcactggccacctctggaggctctgcctttcccaagggccctggcagagggtggggcactgcaccttaccccacccatccatgccagcacttctgcactacggccattctcctcttgggcgctcctcagcctcactgtgacctttctgccagagctcccagccaggcctactctgctgaggtggcgcttcctgctaagggcccttctctgccctttctgccctccttcccatcccacatgctgagccgccacaaagaccaaagaagtgatggcttttctctgtcccctgctgctctgaggggagaggggtgggtctcctgagccactcagatgggaaagtcccttactcggcccctccctccccagcagccccaagctttacactggatgcagcgatcaacccaccactcaccaggcctctcctcccctctgcccccggctcttagctccagctgctccaggtagttggttcatccttccccctctctccctccctgcttccccttcagtgcttacttggctccagccctccagctgcagcccctggggaaaagcagcctcccttctcctctccctccactccctcgctccctccctcagcccctgtctctgccaggtgcctcctctcagtcaggcttcagagcagccctggagacaggagggccatgttaaaagctttttcacagttttaagaagacaagtggagggtgaggatagtggtggggggtctggcaccatctcattgctttaatcccagcaacacaggtggcagcttctcccccttccttcccaccccagtccctcttcccacccctctcttctagcttggtaatgaagtatatttattggtgaaggaaacagctgctgctgcttctcctgctgctgggacctgctcccctgtctcttctccgtgacctttctctagccagggagaagggagagcaggagtattggggctgggccctggggcccaaggaccagctgggtcccctttgctttcttgtgttccagccacctgccatttcctccctgcctcccaccctccctccctgccccctgtcctgcttcccaccccctgcctgcccagcctgggccctgcagtgtggagagacacataagccttactgtcctctgggggcaggagccgagcctttttgttgctccgctcccaggagagtgagggtgacgcaattgattaaaaccattttgttctagg

SEQ ID NO: 89 - DNA, 1102 bp, Homo sapien
tccagaggtggccagtgagagtaggtgcagggccagagctagtagccaggagaggagcgagggtgctccacagcgacctcagcaggtggcctggtcttgcccactccagggctcccatcccacatgctgagccgccacaaagaccaaagaagtgatggcttttctctgtcccctgctgctctgaggggagaggggtgggtctcctgagccactcagatgggaaagtcccttactcggcccctccctccccagcagccccaagctttacactggatgcagcgatcaacccaccactcaccaggcctctcctcccctctgcccccggctcttagctccagctgctccaggtagttggttcatccttccccctctctccctccctgcttccccttcagtgcttacttggctccagccctccagctgcagcccctggggaaaagcagcctcccttctcctctccctccactccctcgctccctccctcagcccctgtctctgccaggtgcctcctctcagtcaggcttcagagcagccctggagacaggagggccatgttaaaagctttttcacagttttaagaagacaagtggagggtgaggatagtggtggggggtctggcaccatctcattgctttaatcccagcaacacaggtggcagcttctcccccttccttcccaccccagtccctcttcccacccctctcttctagcttggtaatgaagtatatttattggtgaaggaaacagctgctgctgcttctcctgctgctgggacctgctcccctgtctcttctccgtgacctttctctagccagggagaagggagagcaggagtattggggctgggccctggggcccaaggaccagctgggtcccctttgctttcttgtgttccagccacctgccatttcctccctgcctcccaccctccctccctgccccctgtcctgcttcccaccccctgcctgcccagcctgggccctgcagtgtggagagacacataagccttactgtcctctgggggcaggagccgagcctttttgttgctccgctcccaggagagtgagggtgacgcaattgattaaaaccattttgttctagg

SEQ ID NO: 90 - DNA, 250 bp, Homo sapien
ttttaaaattgcaacccaggtcattttaagttataaactaatattattccatttagggattcagccatccacaaaaataactgggatggaattaatgaatatttcttaataattaaattatgttttaaaaatatgggtgagttgctagtttattcactgatttgacatatgtgtgaagattgtttttatgtgttagaacaataaagctaaaaatggatatacaacctgaaaataaatatggattacatag

SEQ ID NO: 91 - DNA, 273 bp, Homo sapien
tgcaacccaggtcattttaagttataaactaatattattccatttagggattcagcccatccacaaaaataactgggatggaattaatgaatatttcttaataattaaattatgttttaaacaatatgggtgcagttgctcagtttattccactgcatttgcaccatcatgtgtgcaagcattgtattttcatgtagttagcaaccaatcaacagctcaaaacatggcatcataccaaccctgacacacatcacacatcatggcattacatag

SEQ ID NO: 92 - DNA, 934 bp, Homo sapien
accttcattgagcacctggttgaaatactcaccctctttctaatctggcctaatctaatttggatcaccagcagcctccaaaagagagctattgaaagaggttatatctacttctcatatgtaaacatgtgattccatcaacttgagagttccattgaatagacaaaagatagtcacactactgattcttttaatatacttgttgttttctgcctatggtttgtggcagtgttcagattgacagggctttccttttggatatgttgctagtgttttttggggaaaagatctgagaatttggaaattaaattagataagctagaataagaaagcaatactttgtagactgtgctattcttatattgcttgtactttctcctttcatgattcattttgctcataattagtattgagaaaagtagtttggaagtttttagctcatgtcaaaagcaaatggaaaacagaggcaaggttattgtccatactagtggcagaaatttgaagatgaagtactataatatttgggatctgcatgatagtgaacctggcaatttggcaacaactatagaaagaatgaaatttcctgggaagataatttaggttgctttatgtattgcccttcatcatatggaaattctgtctaatgataattcttgtttggtaagaaaaaaaatgactatttttctgtttgattgagttacttaaaacatacttattttaatatagaggaagtttgacattactgaggtaaacctggatgctattttagtatttgtacctaaaaaccattagagcgtttgattaaaatcaaccatatgataattatgctaaaaaacaacagctaacttaacatggagtgtttatcatgggttagatgttatgctaacattttaagtgatttatctcctctaacttttaagccaatcctatgaag

SEQ ID NO: 93 - DNA, 609 bp, Homo sapien
accttcaagagcacctgcgtgaaatactcaccctctttctaatctggcctaatcgaagttggatcaccagcagcctccaaaagagagctatcgaaagaggttatatctacttctcatatgtaaacatgtgattccatcaacttgagagttccattgaatagacaaaagatagtcacactactgattcttttaatatacttggtggttttctgcctatggtttgtggcagtgttcagattgacagggctttccttttggatatgttggctagtgttttttatggggaaaacgatctgagaatttggaaacttaacacttacgactaacgctacgaactaagaaacgaactactatgtagacctgtgcctacttcttatacttggcttgtacctttctcctttactgacttcattatgcatcataattagtattgagaaaagtagtttggaagtttttagctcatgtcaaaagcaaatggacaacagaggcaaggttatagtccatactagtggccgaacatttgaagcatgaagtactataatattcgggatctgcatgatagtgaacctgggcaattgggaaaaatatagaaagaatgaaatttcctgg

SEQ ID NO: 94 - DNA, 761 bp, Homo sapien
accttcattgagcaccttggttgaaatactcaccctctttctaatctggcctaatctaatttggatcaccagcagcctccaaaagagagctattgaaagaggttatatctacttctcatatgtaaacatgtgattccatcaacttgagagttccattgaatagacaaaagatagtcacactactgattcttttaatatacttgttgttttctgcctatggtttgtggcagtgttcagattgacagggctttccttttggatatgttgctagtgttttttggggaaaagatctgagaatttggaaattaaattagataagctagaataagaaagcaatactttgtagactgtgctattcttatattgcttgtactttctcctttcatgattcattttgctcataattagtattgagaaaagtagtttggaagtttttagctcatgtcaaaagcaaatggaaaacagaggcaaggttattgtccatactagtggcagaaatttgaagatgaagtactataatatttgggatctgcatgatagtgaacctggcaatttggcaacaactatagaaagaatgaaatttcctgggaagataatttaggttgctttatgtattgcccttcatcatatggaaattctgtctaatgataattcttgtttggtaagaaaaaaaatgactatttttctgtttgattgagttacttaaaacatacttattttaatatagaggaagtttgacattactgaggtaaacctggagt

SEQ ID NO: 95 - DNA, 547 bp, Homo sapien
ctggcttggttatagattctgaaggcttttaaaacttttttataaagattatcctgggatggagaatgaagcattcgaacatagtttcaatttgtaagaaacattttgacatatttgaccttttattttctggaaaatcccattatacagaattgaaacagatcaactttgaaaagaagcatataagaaagccattaaacaattctgttttaaagatagaaatagactgaattgatggacaaatatatgctaacaccaaatgctctgacttaaaaattgctttccttgctaacttgacatctacaggatgaacattaaaccttctgactagaaagaatgcacttttttagccttaacagctaaaatatgctctatttgatatactgcttttatctatagtttgccaccaaaattactgcatgttggtgagcatagcaggtacattgagaaaatagtaaagaaactggactgattatctctcacacttcccatagagaaacactgtgaataagagctaggggaatccccacagtatcttgagtattga

SEQ ID NO: 96 - DNA, 1101 bp, Homo sapien
ggcgtgtgctatcagcattctgggaaagtctctggctgagtgaacttgctcttgtggatgttttggaagataagcttaaaggagaaatgatggatctgcagcatgggagcttatttcttcagacacctaaaattgtggcagataaagattattctgtgaccgccaattctaagattgtagtggtaactgcaggagtccgtcagcaagaaggggagagtcggctcaatctggtgcagagaaatgttaatgtcttcaaattcattattcctcagatcgtcaagtacagtcctgattgcatcataattgtggtttccaacccaggtattattgtatactttaagtctctgttctgttaagttcagtgttttggtgttattgttgttattgtttggactaaaatcagtcccagtattcatttacagaagcagtttacatgtcttctttcattggccctaaatagtggtgtttgcaaaacaaatgcctctgtcccaggccagatgttcaaaaaatgtgacaagagttttagctaaagcaatttcatgtttttgcttcatctggcttggttatagattctgaaggcttttaaaacttttttataaagattatcctgggatggagaatgaagcattcgaacatagtttcaatttgtaagaaacattttgacatatttgaccttttattttctggaaaatcccattatacagaattgaaacagatcaactttgaaaagaagcatataagaaagccattaaacaattctgttttaaagatagaaatagactgaattgatggacaaatatatgctaacaccaaatgctctgacttaaaaattgctttccttgctaacttgacatctacaggatgaacattaaaccttctgactagaaagaatgcacttttttagccttaacagctaaaatatgctctatttgatatactgcttttatctatagtttgccaccaaaattactgcatgttggtgagcatagcaggtacattgagaaaatagtaaagaaactggactgattatctctcacacttcccatagagaaacactgtgaataagagctaggggaatccccacagtatcttgagtattga

SEQ ID NO: 97 - DNA, 547 bp, Homo sapien; identical to SEQ ID NO: 95

SEQ ID NO: 98 - DNA, 533 bp, Homo sapien
ataaatggcccacagggtaaacactgaacttattcaacctacaggaggccactgcatcaacacgccacggtcttcccatggcaactgaatcattccttgttcaaaacatttaatcatcttaagcagtggggcttcaacacaccgtttggttagattgtgcagtcagcactctccagtgattagaatgggggaaagaatccactatttgtacagggtttatctttatcatactaaaatgctgagtgagtggaggtctgggaatgaaaatcagaagtattcttcttcttttaattcataagcctcacttaaatcagaacacatttaactatttatatatcaaaaacgtccccaaacaccataagaccagcacagagttgctgccctaaaatgtataattagtgaaaaatttacctctgctttccatttaaagcatggcagtgggttgggtgtcattatgtagtataaaaactggactagataaactgctattttagagcattattagcattctctgaatatatgtatatatacat

SEQ ID NO: 99 - DNA, 698 bp, Homo sapien
ataaatggcccacagggtaaacactgaacttattcaacctacaggaggccactgcatcaacacgccacggtcttcccatggcaactgaatcattccttgttcaaaacatttaatcatcttaagcagtggggcttcaacacaccgtttggttagattgtgcagtcagcactctccagtgattagaatgggggaaagaatccactatttgtacagggtttatctttatcatactaaaatgctgagtgagtggaggtctgggaatgaaaatcagaagtcttcttcttcttttaattcataagcctcacttaaatcagaacacatttaactatttatatatcaaaaacgtccccaaacaccataagaccagcacagagttgctgccctaaaatgtataattagtgaaaaatttacctctgcttccatttaaagcatggcagtgggttgggtgtcattatgtagtataaaaactggactagataaactgctattttagagcattattagcattctctgaatatatgtatatatacatatatatacgcacacacacacacacataaatatatatatatatatatatatagactcacatactcccaattaaaagtcgtgtgaaagctacacaggattacagagggatctataatatcacttttgctctttgactaatcctatgctgtttttgttatagagagaac

SEQ ID NO: 100 - DNA, 584 bp, Homo sapien
ataaatggcccacagggtaaacactgaacttattcaacctacaggaggccactgcatcaacacgccacggtcttcccatggcaactgaatcattccttgttcaaaacatttaatcatcttaagcagtggggcttcaacacaccgtttggttagattgtgcagtcagcactctccagtgattagaatgggggaaagaatccactatttgtacagggtttatctttatcatactaaaatgctgagtgagtggaggtctgggaatgaaaatcagaagtcttcttcttcttttaattcataagcctcacttaaatcagaacacatttaactatttatatatcaaaaacgtccccaaacaccataagaccagcacagagttgctgccctaaaatgtataattagtgaaaaatttacctctgcttccatttaaagcatggcagtgggttgggtgtcattatgtagtataaaaactggactagataaactgctattttagagcattattagcattctctgaatatatgtatatatacatatatatacgcacacacacacacacacataaatatatatatatatatatatat

SEQ ID NO: 101 - DNA, 1214 bp, Homo sapien
  misc_feature (899)..(899): n=a,c,g or t
  misc_feature (973)..(973): n=a,c,g or t
ataaatttgcatcttcttgaaatgggctccaagaagcaggtttgtggccagtagagccagctcagaacccaggagtggtacaaaaagcattcagatatcaagattcccctcctggctgcatcttccatgggggaggccatgaaaggggcccctggtgaaccattgagtcatttatagctaatcttagtacactccctgaagtagggaatgacatgggctgcaagaattcttcctaagcaccccagagagaacttcaccgatttaaaatatgagtttctgtaacctgagcaggagcttgcctggtgcaagggcttatgcagcctgcctgccagggaggccagagggtcgcacttatgagcttgagcaaatggggcttttgggaatcagcagcctccctgagctttcctggagcgagctgaactgaccctgaacttggagggcttgctggcaggcttttgatgtctcctgatattgcagtttcaacatgagaggggcaggaaatagaagccccatgcgttgaaggactgctgtgcctgcacttatctctggccagggagtccttggacactgttttctttggcagccagctggtctaggtcacttgaattcctttgaagttcagggatacagggagcggtagccactgcctgcattccttactcaggaggcaggcatggggtctgccattgcttacctgccagagaaccaggccttcattagaaaggtcatttttatgtgactatgactgaatagtccagccttttccccttaagtgggattttgtgctgattcagcagtaaagaataagcccataccccccatttttgttgccattgctcacatttgaatttataggtggagaattggtgaagaaaacgtgatgtagatgcccatcccanaaggagcaagatctgctcttgcagtgggtgttgagaagggctgggaggctctttcagtcaaatatggagctganaactgtcagaatgtgctggttgtacattatcaataagaatcctaacaggagcacagtgtgatttctcttcgtagtgggcgtacatggtcttgggtttccatgtgcagcagtgagaagtggtctccaaagcagaaaggtggcaaaagcagcagagcctgctttcccttgggcttaaagggagcaccccatacagaatgcttgcttggctgaagttaatgctgaccgttctgctttggagacc

SEQ ID NO: 102 - DNA, 452 bp, Homo sapien
gcaggcttttgctgtctcctgatattgcagtttcaacatgagaggggcaggaaatagaagccccatgcgttgaaggactgctgtgcctgcacttatctctggccagggagtccttggacactgttttctttggcagccagctggtctaggtcacttgaattcctttgaagttcagggatacagggagcggtagccactgcctgcattccttactcaggaggcaggcatggggtctgccattgcttacctgccagagaaccaggccttcattagaaaggtcatttttatgtgactatgactgaatagtccagccttttccccttaagtgggattttgtgctgattcagcagtaaagaataagcccataccccccatttttgttgccattgctcacatttgaatttataggtggagaattggtgaagaaaacgtgatgtagatgcccatcccat

SEQ ID NO: 103 - DNA, 1406 bp, Homo sapien
gcaggcttttgctgtctcctgatattgcagtttcaacatgagaggggcaggaaatagaagccccatgcgttgaaggactgctgtgcctgcacttatctctggccagggagtccttggacactgttttctttggcagccagctggtctaggtcacttgaattcctttgaagttcagggatacagggagcggtagccactgcctgcattccttactcaggaggcaggcatggggtctgccattgcttacctgccagagaaccaggccttcattagaaaggtcatttttatgtgactatgactgaatagtccagccttttccccttaagtgggattttgtgctgattcagcagtaaagaataagcccataccccccatttttgttgccattgctcacatttgaatttataggtggagaattggtgaagaaaaaaaaacctttgatctttggtacaaatacagctgtggggctgttgcccacatttgccgtgatgtagatgcccatcccaaaaggagcaagatctgctcttgcagtgggtgttgagaggggctgggaggctttttcagtcaaatatggagctgaaaactgtcagaatgtgctggttgtacattatcaataagaatcctaacaggagcacagtgtgatttctcttcgtagtgggcgtacatggtcttgggtttccatgtgcagcagtgagagttggtctccaaagcagaacggtcagcattaacttcagccaagcaagcattctgtatggggtgctccctttaagcccaagggaaagcaggctctgctgcttttgccacctttcagagggagaggtgtgccccaccaggggtgcaggtgtgctggggcgtgaagataaaattagttgtttggaaaaaaataatgtctttaagtttctgcagagcagatcgtaccaattaaaatcagttcatcagaggattttttagtcaatccatacattcacacataaagagatgtgattataagtaacttggctgattccacaagctactcacaaaatcagatcattattttgtaatcacatttgtgggtttagatgcctgagagaccttctgaaccatcaccgttttgggtgcctgtgagaatatttgaaactaccggccgggcgtggtggctcacgcctggaatcccagcactttgggaggctgaggcaggcagattactggaggtcaggagttggagaccagcctggccaactgatgaaacaccatctctactaaaaatacaaaaattagcccagcatggtggtgggcacctgtaattccagctactggggaggctgaagcaggagaatcgcttgaaccgaagaggcggaggttgcagtgagccgaaatcatgccactgcactccagcttgggtaaaagaatgagactccatctca

SEQ ID NO: 104 - DNA, 903 bp, Homo sapien
gcaggcttttgctgtctcctgatattgcagtttcaacatgagaggggcaggaaatagaagccccatgcgttgaaggactgctgtgcctgcacttatctctggccagggagtccttggacactgttttctttggcagccagctggtctaggtcacttgaattcctttgaagttcagggatacagggagcggtagccactgcctgcattccttactcaggaggcaggcatggggtctgccattgcttacctgccagagaaccaggccttcattagaaaggtcatttttatgtgactatgactgaatagtccagccttttccccttaagtgggattttgtgctgattcagcagtaaagaataagcccataccccccatttttgttgccattgctcacatttgaatttataggtggagaattggtgaagaaaaaaaaacctttgatctttggtacaaatacagctgtggggctgttgcccacatttgccgtgatgtagatgcccatcccaaaaggagcaagatctgctcttgcagtgggtgttgagaggggctgggaggctttttcagtcaaatatggagctgaaaactgtcagaatgtgctggttgtacattatcaataagaatcctaacaggagcacagtgtgatttctcttcgtagtgggcgtacatggtcttgggtttccatgtgcagcagtgagagttggtctccaaagcagaacggtcagcattaacttcagccaagcaagcattctgtatggggtgctccctttaagcccaagggaaagcaggctctgctgcttttgccacctttctgctttggagaccaactctcactgctgcacatggaaacccaagaccatgtacgaccactacgaagagaaatcacactgtgctcctgttaggatt

SEQ ID NO: 105 - DNA, 529 bp, Homo sapien
cgcggcgtggggacagcgaggcgcactggggcctcccagcgcggggccggccgcgccgtccagcccgaggtctacggctttgcgctccgagcccagaggaagatgcctgccggcaccgagctcgggctgcggggctgaacgcctgtcttccaggcgcagcggcagcactgccctcggccggtgtcggtagcggcactcggcgtgccccgggcggacgaagagcgcaggctgggtacaccttgcccgaatcggcggagttcgcagctagcgagggcgggccggccggcccggatgggcgcggggtttgcggcccccgccgggtgctccggagcggcccgggcaccgggggcacgctgagtgccggagccgcggccgcagagagaacttggggcgggggccatgccccggtgcggagtctagagccgagcggagcgccccgcgggcccgcccgcgtctgcgggcgttcgggtcctcacagtccccgcgcccggagttcgcagcgcgctccagacaagatggcgcgggcggt

SEQ ID NO: 106 - DNA, 5337 bp, Homo sapien
gggactcttctgcgcggaggagccgtgcggaacccgagctgcgcgcgcgcgcgcagctctctggccgcggcgtggggacagcgaggcgcactggggcctcccagcgcggggccggccgcgccgtccagcccgaggtctacggctttgcgctccgagcccagaggaagatgcctgccggcaccgagctcgggctgcggggctgaacgcctgtcttccaggcgcagcggcagcactgccctcggccggtgtcggtagcggcactcggcgtgccccgggcggacgaagagcgcaggctgggtacaccttgcccgaatcggcggagttcgcagctagcgagggcgggccggccggcccggatgggcgcggggtttgcggcccccgccgggtgctccggagcggcccgggcaccgggggcacgctgagtgccggagccgcggccgcagagagaacttggggcgggggccatgccccggtgcggagtctagagccgagcggagcgccccgcgggcccgcccgcgtctgcgggcgttcgggtcctcacagtccccgcgcccggagttcgcagcgcgctccagacaagatggcgcggccggtccggggagggctcggggccccgcgccgctcgccttgccttctccttctctggctgcttttgcttcggctggagccggtgaccgccgcggccggcccgcgggcgccctgcgcggccgcctgcacttgcgctggggactcgctggactgcggtgggcgcgggctggctgcgttgcccggggacctgccctcctggacgcggagcctaaacctgagttacaacaaactctctgagattgaccctgctggttttgaggacttgccgaacctacaggaagtgtacctcaataataatgagttgacagcggtaccatccctgggcgctgcttcatcacatgtcgtctctctctttctgcagcacaacaagattcgcagcgtggaggggagccagctgaaggcctacctttccttagaagtgttagatctgagtttgaacaacatcacggaagtgcggaacacctgctttccacacggaccgcctataaaggagctcaacctggcaggcaatcggattggcaccctggagttgggagcatttgatggtctgtcacggtcgctgctaactcttcgcctgagcaaaaacaggatcacccagcttcctgtaagagcattcaagctacccaggctgacacaactggacctcaatcggaacaggattcggctgatagagggcctcaccttccaggggctcaacagcttggaggtgctgaagcttcagcgaaacaacatcagcaaactgacagatggggccttctggggactgtccaagatgcatgtgctgcacctggagtacaacagcctggtagaagtgaacagcggctcgctctacggcctcacggccctgcatcagctccacctcagcaacaattccatcgctcgcattcaccgcaagggctggagcttctgccagaagctgcatgagttggtcctgtccttcaacaacctgacacggctggacgaggagagcctggccgagctgagcagcctgagtgtcctgcgtctcagccacaattccatcagccacattgcggagggtgccttcaagggactcaggagcctgcgagtcttggatctggaccataacgagatttcgggcacaatagaggacacgagcggcgccttctcagggctcgacagcctcagcaagctgactctgtttggaaacaagatcaagtctgtggctaagagagcattctcggggctggaaggcctggagcacctgaaccttggagggaatgcgatcagatctgtccagtttgatgcctttgtgaagatgaagaatcttaaagagctccatatcagcagcgacagcttcctgtgtgactgccagctgaagtggctgcccccgtggctaattggcaggatgctgcaggcctttgtgacagccacctgtgcccacccagaatcactgaagggtcagagcattttctctgtgccaccagagagtttcgtgtgcgatgacttcctgaagccacagatcatcacccagccagaaaccaccatggctatggtgggcaaggacatccggtttacatgctcagcagccagcagcagcagctcccccatgacctttgcctggaagaaagacaatgaagtcctgaccaatgcagacatggagaactttgtccacgtccacgcgcaggacggggaagtgatggagtacaccaccatcctgcacctccgtcaggtcactttcgggcacgagggccgctaccaatgtgtcatcaccaaccactttggctccacctattcacataaggccaggctcaccgtgaatgtgttgccatcattcaccaaaacgccccacgacataaccatccggaccaccaccatggcccgcctcgaatgtgctgccacaggtcacccaaaccctcagattgcctggcagaaggatggaggcacggatttccccgctgcccgtgagcgacgcatgcatgtcatgccggatgacgacgtgtttttcatcactgatgtgaaaatagatgacgcaggggtttacagctgtactgctcagaactcagccggttctatttcagctaatgccaccctgactgtcctagagaccccatccttggtggtccccttggaagaccgtgtggtatctgtgggagaaacagtggccctccaatgcaaagccacggggaaccctccgccccgcatcacctggttcaagggggaccgcccgctgagcctcactgagcggcaccacctgacccctgacaaccagctcctggtggttcagaacgtggtggcagaggatgcgggccgatatacctgtgagatgtccaacaccctgggcacggagcgagctcacagccagctgagcgtcctgcccgcagcaggctgcaggaaggatgggaccacggtaggcatcttcaccattgctgtcgtgagcagcatcgtcctgacgtcactggtctgggtgtgcatcatctaccagaccaggaagaagagtgaagagtacagtgtcaccaacacagatgaaaccgtcgtgccaccagatgttccaagctacctctcttctcaggggaccctttctgaccgacaagaaaccgtggtcaggaccgagggtggccctcaggccaatgggcacattgagagcaatggtgtgtgtccaagagatgcaagccactttccagagcccgacactcacagcgttgcctgcaggcagccaaagctctgtgctgggtctgcgtatcacaaagagccgtggaaagcgatggagaaagctgaagggacacctgggccacataagatggaacacggtggccgggtcgtatgcagtgactgcaacaccgaagtggactgttactccaggggacaagccttccacccccagcctgtgtccagagacagcgcacagccaagtgcgccaaatggcccggagccgggtgggagtgaccaagagcattctccacatcaccagtgcagcaggactgccgctgggtcctgccccgagtgccaagggtcgctctaccccagtaaccacgatagaatgctgacggctgtgaagaaaaagccaatggcatctctagatgggaaaggggattcttcctggactttagcaaggttgtatcacccggactccacagagctacagcctgcatcttcattaacttcaggcagtccagagcgcgcggaagcccagtacttgcttgtttccaatggccacctccccaaagcatgtgacgccagtcccgagtccacgccactgacaggacagctccccgggaaacagagggtgccactgctgttggcaccaaaaagctaggttttgtctacctcagttcttgtcataccaatctctacgggaaagagaggtaggagaggctgcgaggaagcttgggttcaagcgtcactcatctgtacatagttgtaactcccatgtggagtatcagtcgctcacaggacttggatctgaagcacagtaaacgcaagaggggatttgtgtacaaaaggcaaaaaaagtatttgatatcattgtacataagagttttcagagatttcatatatatcttttacagaggctattttaatctttagtgcatggttaacagaaaaaaattatacaattttgacaatattatttttcgtatcaggttgctgtttaattttggagggggtggggaaatagttctggtgccttaacgcatggctggaatttatagaggctacaaccacatttgttcacaggagtttttggtgcggggtgggaaggatggaaggccttggatttatattgcacttcatagacccctaggctgctgtgcggtgggactccacatgcgccggaaggagcttcaggtgagcactgctcatgtgtggatgcccctgcaacaggcttccctgtctgtagagccaggggtgcaagtgccatccacacttgcagtgaatggcttttccttttaggtttaagtcctgtctgtctgtaaggcgtagaatctgtccgtctgtaaggcgtagaatgagggttgttaatccatcacaagcaaaaggtcagaacagttaaacactgcctttcctcctcctcttattttatgataaaagcaaatgtggccttctcagtatcattcgattgctatttgagacttttaaattaaggtaaaggctgctggtgttggtacctgtggatttttctatactgatgttttcgttttgccaatataatgagtattacattggccttgggggacagaaaggaggaagttctgacttttcagggctaccttatttctactaaggacccagagcaggcctgtccatgccattccttcgcacagatgaaactgagctgggactggaaaggacagcccttgacctgggttctgggtataatttgcacttttgagactggtagctaaccatcttatgagtgccaatgtgtcatttagtaaaacttaaatagaaacaaggtccttcaaatgttcctttggccaaaagctgaagggagttactgagaaaatagttaacaattactgtcaggtgtcatcactgttcaaaaggtaagcacatttagaattttgttcttgacagttaactgactaatcttacttccacaaaatatgtgaatttgctgcttctgagaggcaatgtgaaagagggagtattacttttatgtacaaagttatttatttatagaaattttggtacagtgtacattgaaaaccatgtaaaatattgaagtgtctaacaaatggcattgaagtgtctttaataaaggttcatttataaatgtcaaaaaaaaaa

SEQ ID NO: 107 - DNA, 5353 bp, Homo sapien
ggcgggactcttgctgcgcggaggagccgtgcggaacccgaggctgcgcgcgcgcgcgcgctctctggccgcggcgtggggacagcgaggcgcactggggcctcccagcgcggggccggccgcgccgtccagcccgaggtctacggctttgcgctccgagcccagaggaagatgcctgccggcaccgagctcgggctgcggggctgaacgcctgtcttccaggcgcagcggcagcactgccctcggccggtgtcggtagcggcactcggcgtgccccgggcggacgaagagcgcaggctgggtacaccttgcccgaatcggcggagttcgcagctagcgagggcgggccggccggcccggatgggcgcggggtttgcggcccccgccgggtgctccggagcggcccgggcaccgggggcacgctgagtgccggagccgcggccgcagagagaacttggggcgggggccatgccccggtgcggagtctagagccgagcggagcgccccgcgggcccgcccgcgtctgcggccgttcgggtcctcacagtccccgcgcccggagttcgcagcgcgctccagacaagatggcgcggccggtccggggagggctcggggccccgcgccgctcgccttgccttctccttctctggctgcttttgcttcggctggagccggtgaccgccgcggccggcccgcgggcgccctgcgcggccgcctgcacttgcgctggggactcgctggactgcggtgggcgcgggctggctgcgttgcccggggacctgccctcctggacgcggagcctaaacctgagttacaacaaactctctgagattgaccctgctggttttgaggacttgccgaacctacaggaagtgtacctcaataataatgagttgacagcggtaccatccctgggcgctgcttcatcacatgtcgtctctctctttctgcagcacaacaagattcgcagcgtggaggggagccagctgaaggcctacctttccttagaagtgttagatctgagtttgaacaacatcacggaagtgcggaacacctgctttccacacggaccgcctataaaggagctcaacctggcaggcaatcggattggcaccctggagttgggagcatttgatggtctgtcacggtcgctgctaactcttcgcctgagcaaaaacaggatcacccagcttcctgtaagagcattcaagctacccaggctgacacaactggacctcaatcggaacaggattcggctgatagagggcctcaccttccaggggctcaacagcttggaggtgctgaagcttcagcgaaacaacatcagcaaactgacagatggggccttctggggactgtccaagatgcatgtgctgcacctggagtacaacagcctggtagaagtgaacagcggctcgctctacggcctcacggccctgcatcagctccacctcagcaacaattccatcgctcgcattcaccgcaagggctggagcttctgccagaagctgcatgagttggtcctgtccttcaacaacctgacacggctggacgaggagagcctggccgagctgagcagcctgagtgtcctgcgtctcagccacaattccatcagccacattgcggagggtgccttcaagggactcaggagcctgcgagtcttggatctggaccataacgagatttcgggcacaatagaggacacgagcggcgccttctcagggctcgacagcctcagcaagctgactctgtttggaaacaagatcaagtctgtggctaagagagcattctcggggctggaaggcctggagcacctgaaccttggagggaatgcgatcagatctgtccagtttgatgcctttgtgaagatgaagaatcttaaagagctccatatcagcagcgacagcttcctgtgtgactgccagctgaagtggctgcccccgtggctaattggcaggatgctgcaggcctttgtgacagccacctgtgcccacccagaatcactgaagggtcagagcattttctctgtgccaccagagagtttcgtgtgcgatgacttcctgaagccacagatcatcacccagccagaaaccaccatggctatggtgggcaaggacatccggtttacatgctcagcagccagcagcagcagctcccccatgacctttgcctggaagaaagacaatgaagtcctgaccaatgcagacatggagaactttgtccacgtccacgcgcaggacggggaagtgatggagtacaccaccatcctgcacctccgtcaggtcactttcgggcacgagggccgctaccaatgtgtcatcaccaaccactttggctccacctattcacataaggccaggctcaccgtgaatgtgttgccatcattcaccaaaacgccccacgacataaccatccggaccaccaccgtggcccgcctcgaatgtgctgccacaggtcacccaaaccctcagattgcctggcagaaggatggaggcacggatttccccgctgcccgtgagcgacgcatgcatgtcatgccggatgacgacgtgtttttcatcactgatgtgaaaatagatgacgcaggggtttacagctgtactgctcagaactcagccggttctatttcagctaatgccaccctgactgtcctagagaccccatccttggtggtccccttggaagaccgtgtggtatctgtgggagaaacagtggccctccaatgcaaagccacggggaaccctccgccccgcatcacctggttcaagggggaccgcccgctgagcctcactgagcggcaccacctgacccctgacaaccagctcctggtggttcagaacgtggtggcagaggatgcgggccgatatacctgtgagatgtccaacaccctgggcacggagcgagctcacagccagctgagcgtcctgcccgcagcaggctgcaggaaggatgggaccacggtaggcatcttcaccattgctgtcgtgagcagcatcgtcctgacgtcactggtctgggtgtgcatcatctaccagaccaggaagaagagtgaagagtacagtgtcaccaacacagatgaaaccgtcgtgccaccagatgttccaagctacctctcttctcaggggaccctttctgaccgacaagaaaccgtggtcaggaccgagggtggccctcaggccaatgggcacattgagagcaatggtgtgtgtccaagagatgcaagccactttccagagcccgacactcacagcgttgcctgcaggcagccaaagctctgtgctgggtctgcgtatcacaaagagccgtggaaagcgatggagaaagctgaagggacacctgggccacataagatggaacacggtggccgggtcgtatgcagtgactgcaacaccgaagtggactgttactccaggggacaagccttccacccccagcctgtgtccagagacagcgcacagccaagtgcgccaaatggcccggagccgggtgggagtgaccaagagcattctccacatcaccagtgcagcaggactgccgctgggtcctgccccgagtgccaagggtcgctctaccccagtaaccacgatagaatgctgacggctgtgaagaaaaagccaatggcatctctagatgggaaaggggattcttcctggactttagcaaggttgtatcacccggactccacagagctacagcctgcatcttcattaacttcaggcagtccagagcgcgcggaagcccagtacttgcttgtttccaatggccacctccccaaagcatgtgacgccagtcccgagtccacgccactgacaggacagctccccgggaaacagagggtgccactgctgttggcaccaaaaagctaggttttgtctacctcagttcttgtcataccaatctctacgggaaagagaggtaggagaggctgcgaggaagcttgggttcaagcgtcactcatctgtacatagttgtaactcccatgtggagtatcagtcgctcacaggacttggatctgaagcacagtaaacgcaagaggggatttgtgtacaaaaggcaaaaaaagtatttgatatcattgtacataagagttttcagagatttcatatatatcttttacagaggctattttaatctttagtgcatggttaacagaaaaaaattatacaattttgacaatattatttttcgtatcaggttgctgtttaattttggagggggtggggaaatagttctggtgccttaacgcatggctggaatttatagaggctacaaccacatttgttcacaggagtttttggtgcggggtgggaaggatggaaggccttggatttatattgcacttcatagacccctaggctgctgtgcggtgggactccacatgcgccggaaggagcttcaggtgagcactgctcatgtgtggatgcccctgcaacaggcttccctgtctgtagagccaggggtgcaagtgccatccacacttgcagtgaatggcttttccttttaggtttaagtcctgtctgtctgtaaggcgtagaatctgtccgtctgtaaggcgtagaatgagggttgttaatccatcacaagcaaaaggtcagaacagttaaacactgcctttcctcctcctcttattttatgataaaagcaaatgtggccttctcagtatcattcgattgctatttgagacttttaaattaaggtaaaggctgctggtgttggtacctgtggatttttctatactgatgttttcgttttgccaatataatgagtattacattggccttgggggacagaaaggaggaagttctgacttttcagggctaccttatttctactaaggacccagagcaggcctgtccatgccattccttcgcacagatgaaactgagctgggactggaaaggacagcccttgacctgggttctgggtataatttgcacttttgagactggtagctaaccatcttatgagtgccaatgtgtcatttagtaaaacttaaatagaaacaaggtccttcaaatgttcctttggccaaaagctgaagggagttactgagaaaatagttaacaattactgtcaggtgtcatcactgttcaaaaggtaagcacatttagaattttgttcttgacagttaactgactaatcttacttccacaaaatatgtgaatttgctgcttctgagaggcaatgtgaaagagggagtattacttttatgtacaaagttatttatttatagaaattttggtacagtgtacattgaaaaccatgtaaaatattgaagtgtctaacaaatggcattgaagtgtctttaataaaggttcatttataaatgtcaaaaaaaaattttttaaaaatt

SEQ ID NO: 108 - DNA, 862 bp, Homo sapien
agggaagaatggggctttggataagttaaaataccacaaagctcacatttctgagatgttgctatttgcttgaatcaacaatccatggattgttgtaagcctttggttttccagaattctgaaaaagttgcttttgaccatttttccaggtgttttccttgttttaatggaggtgcagatttttggaggtccttattctgacattttggaagtgttttacaccccctccttttggagtaaggtttgtgggtaagatctctgcagtcatgaccagtggtgcctgactgttttgtgtgaaagtcagcaggcagagccagttgtcttaaggaaactgccggctggctggtttgagaactgagaagtggtgggttaatttctaatcaaggagtgtgatcataaaggtgatcagtactcacagacttctaattagatgaggtcagatgtccatggtgcaactcttacggcatctggttggtggggctgaggatgcacagggacctcaagctctggttcctgcttggtgtctgtgtcagtttctgttagcatgaacagcagctggttcctctgtgtaccaagaacccagcgctttacagttgacccttctctccccagatgacttcctgaagccacagatcatcacccagccagaaaccaccatggctatggtgggcaaggacatccggtttacatgctcagcagccagcagcagcagctcccccaagaaccacctggtggagatcccgaccaaactacccagctccctggtggagctccgcatccacggagatcgtgatcctcgaggatcacgatgtccgtcggacatggtgcagggagactcgaagtactgtcgggctagtcgggg

SEQ ID NO: 109 - DNA, 5263 bp, Homo sapien
ggcgggactcttgctgcgcggaggagccgtgcggaacccgaggctgcgcgcgcgcgcgcgctctctggccgcggcgtggggacagcgaggcgcactggggcctcccagcgcggggccggccgcgccgtccagcccgaggtctacggctttgcgctccgagcccagaggaagatgcctgccggcaccgagctcgggctgcggggctgaacgcctgtcttccaggcgcagcggcagcactgccctcggccggtgtcggtagcggcactcggcgtgccccgggcggacgaagagcgcaggctgggtacaccttgcccgaatcggcggagttcgcagctagcgagggcgggccggccggcccggatgggcgcggggtttgcggcccccgccgggtgctccggagcggcccgggcaccgggggcacgctgagtgccggagccgcggccgcagagagaacttggggcgggggccatgccccggtgcggagtctagagccgagcggagcgccccgcgggcccgcccgcgtctgcggccgttcgggtcctcacagtccccgcgcccggagttcgcagcgcgctccagacaagatggcgcggccggtccggggagggctcggggccccgcgccgctcgccttgccttctccttctctggctgcttttgcttcggctggagccggtgaccgccgcggccggcccgcgggcgccctgcgcggccgcctgcacttgcgctggggactcgctggactgcggtgggcgcgggctggctgcgttgcccggggacctgccctcctggacgcggagcctaaacctgagttacaacaaactctctgagattgaccctgctggttttgaggacttgccgaacctacaggaagtgtacctcaataataatgagttgacagcggtaccatccctgggcgctgcttcatcacatgtcgtctctctctttctgcagcacaacaagattcgcagcgtggaggggagccagctgaaggcctacctttccttagaagtgttagatctgagtttgaacaacatcacggaagtgcggaacacctgctttccacacggaccgcctataaaggagctcaacctggcaggcaatcggattggcaccctggagttgggagcatttgatggtctgtcacggtcgctgctaactcttcgcctgagcaaaaacaggattcggctgatagagggcctcaccttccaggggctcaacagcttggaggtgctgaagcttcagcgaaacaacatcagcaaactgacagatggggccttctggggactgtccaagatgcatgtgctgcacctggagtacaacagcctggtagaagtgaacagcggctcgctctacggcctcacggccctgcatcagctccacctcagcaacaattccatcgctcgcattcaccgcaagggctggagcttctgccagaagctgcatgagttggtcctgtccttcaacaacctgacacggctggacgaggagagcctggccgagctgagcagcctgagtgtcctgcgtctcagccacaattccatcagccacattgcggagggtgccttcaagggactcaggagcctgcgagtcttggatctggaccataacgagatttcgggcacaatagaggacacgagcggcgccttctcagggctcgacagcctcagcaagctgactctgtttggaaacaagatcaagtctgtggctaagagagcattctcggggctggaaggcctggagcacctgaaccttggagggaatgcgatcagatctgtccagtttgatgcctttgtgaagatgaagaatcttaaagagctccatatcagcagcgacagcttcctgtgtgactgccagctgaagtggctgcccccgtggctaattggcaggatgctgcaggcctttgtgacagccacctgtgcccacccagaatcactgaagggtcagagcattttctctgtgccaccagagagtttcgtgtgcgatgacttcctgaagccacagatcatcacccagccagaaaccaccatggctatggtgggcaaggacatccggtttacatgctcagcagccagcagcagcagctcccccatgacctttgcctggaagaaagacaatgaagtcctgaccaatgcagacatggagaactttgtccacgtccacgcgcaggacggggaagtgatggagtacaccaccatcctgcacctccgtcaggtcactttcgggcacgagggccgctaccaatgtgtcatcaccaaccactttggctccacctattcacataaggccaggctcaccgtgaatgtgttgccatcattcaccaaaacgccccacgacataaccatccggaccaccaccgtggcccgcctcgaatgtgctgccacaggtcacccaaaccctcagattgcctggcagaaggatggaggcacggatttccccgctgcccgtgagcgacgcatgcatgtcatgccggatgacgacgtgtttttcatcactgatgtgaaaatagatgacgcaggggtttacagctgtactgctcagaactcagccggttctatttcagctaatgccaccctgactgtcctagagaccccatccttggtggtccccttggaagaccgtgtggtatctgtgggagaaacagtggccctccaatgcaaagccacggggaaccctccgccccgcatcacctggttcaagggggaccgcccgctgagcctcactgagcggcaccacctgacccctgacaaccagctcctggtggttcagaacgtggtggcagaggatgcgggccgatatacctgtgagatgtccaacaccctgggcacggagcgagctcacagccagctgagcgtcctgcccgcagcaggctgcaggaaggatgggaccacggtaggcatcttcaccattgctgtcgtgagcagcatcgtcctgacgtcactggtctgggtgtgcatcatctaccagaccaggaagaagagtgaagagtacagtgtcaccaacacagatgaaaccgtcgtgccaccagatgttccaagctacctctcttctcaggggaccctttctgaccgacaagaaaccgtggtcaggaccgagggtggccctcaggccaatgggcacattgagagcaatggtgtgtgtccaagagatgcaagccactttccagagcccgacactcacagcgttgcctgcaggcagccaaagctctgtgctgggtctgcgtatcacaaagagccgtggaaagcgatggagaaagctgaagggacacctgggccacataagatggaacacggtggccgggtcgtatgcagtgactgcaacaccgaagtggactgttactccaggggacaagccttccacccccagcctgtgtccagagacagcgcacagccaagtgcgccaaatggcccggagccgggtgggagtgaccaagagcattctccacatcaccagtgcagcaggactgccgctgggtcctgccccgagtgccaagggtcgctctaccccagtaaccacgatagaatgctgacggctgtgaagaaaaagccaatggcatctctagatgggaaaggggattcttcctggactttagcaaggttgtatcacccggactccacagagctacagcctgcatcttcattaacttcaggcagtccagagcgcgcggaagcccagtacttgcttgtttccaatggccacctccccaaagcatgtgacgccagtcccgagtccacgccactgacaggacagctccccgggaaacagagggtgccactgctgttggcaccaaaaagctaggttttgtctacctcagttcttgtcataccaatctctacgggaaagagaggtaggagaggctgcgaggaagcttgggttcaagcgtcactcatctgtacatagttgtaactcccatgtggagtatcagtcgctcacaggacttggatctgaagcacagtaaacgcaagaggggatttgtgtacaaaaggcaaaaaaagtatttgatatcattgtacataagagttttcagagatttcatatatatcttttacagaggctattttaatctttagtgcatggttaacagaaaaaaattatacaattttgacaatattatttttcgtatcaggttgctgtttaattttggagggggtggggaaatagttctggtgccttaacgcatggctggaatttatagaggctacaaccacatttgttcacaggagtttttggtgcggggtgggaaggatggaaggccttggatttatattgcacttcatagacccctaggctgctgtgcggtgggactccacatgcgccggaaggagcttcaggtgagcactgctcatgtgtggatgcccctgcaacaggcttccctgtctgtagagccaggggtgcaagtgccatccacacttgcagtgaatggcttttccttttaggtttaagtcctgtctgtctgtaaggcgtagaatctgtccgtctgtaaggcgtagaatgagggttgttaatccatcacaagcaaaaggtcagaacagttaaacactgcctttcctcctcctcttattttatgataaaagcaaatgtggccttctcagtatcattcgattgctatttgagacttttaaattaaggtaaaggctgctggtgttggtacctgtggatttttctatactgatgttttcgttttgccaatataatgagtattacattggccttgggggacagaaaggaggaagttctgacttttcagggctaccttatttctactaaggacccagagcaggcctgtccatgccattccttcgcacagatgaaactgagctgggactggaaaggacagcccttgacctgggttctgggtataatttgcacttttgagactggtagctaaccatcttatgagtgccaatgtgtcatttagtaaaacttaaatagaaacaaggtccttcaaatgttcctttggccaaaagctgaagggagttactgagaaaatagttaacaattactgtcaggtgtcatcactgttcaaaaggtaagcacatttagaattttgttcttgacagttaactgactaatcttacttccacaaaatatgtgaatttgctgcttctgagaggcaatgtgaaagagggagtattacttttatgtacaaagttatttatttatagaaattttggtacagtgtacattgaaaaccatgtaaaatattgaagtgtctaacaaatggcattgaagtgtctttaataaaggttcatttataaatgtca

SEQ ID NO: 110 - DNA, 5857 bp, Homo sapien
ggcgggactcttgctgcgcggaggagccgtgcggaacccgaggctgcgcgcgcgcgcgcgctctctggccgcggcgtggggacagcgaggcgcactggggcctcccagcgcggggccggccgcgccgtccagcccgaggtctacggctttgcgctccgagcccagaggaagatgcctgccggcaccgagctcgggctgcggggctgaacgcctgtcttccaggcgcagcggcagcactgccctcggccggtgtcggtagcggcactcggcgtgccccgggcggacgaagagcgcaggctgggtacaccttgcccgaatcggcggagttcgcagctagcgagggcgggccggccggcccggatgggcgcggggtttgcggcccccgccgggtgctccggagcggcccgggcaccgggggcacgctgagtgccggagccgcggccgcagagagaacttggggcgggggccatgccccggtgcggagtctagagccgagcggagcgccccgcgggcccgcccgcgtctgcggccgttcgggtcctcacagtccccgcgcccggagttcgcagcgcgctccagacaagatggcgcggccggtccggggagggctcggggccccgcgccgctcgccttgccttctccttctctggctgcttttgcttcggctggagccggtgaccgccgcggccggcccgcgggcgccctgcgcggccgcctgcacttgcgctggggactcgctggactgcggtgggcgcgggctggctgcgttgcccggggacctgccctcctggacgcggagcctaaacctgagttacaacaaactctctgagattgaccctgctggttttgaggacttgccgaacctacaggaagtgtacctcaataataatgagttgacagcggtaccatccctgggcgctgcttcatcacatgtcgtctctctctttctgcagcacaacaagattcgcagcgtggaggggagccagctgaaggcctacctttccttagaagtgttagatctgagtttgaacaacatcacggaagtgcggaacacctgctttccacacggaccgcctataaaggagctcaacctggcaggcaatcggattggcaccctggagttgggagcatttgatggtctgtcacggtcgctgctaactcttcgcctgagcaaaaacaggatcacccagcttcctgtaagagcattcaagctacccaggctgacacaactggacctcaatcggaacaggattcggctgatagagggcctcaccttccaggggctcaacagcttggaggtgctgaagcttcagcgaaacaacatcagcaaactgacagatggggccttctggggactgtccaagatgcatgtgctgcacctggagtacaacagcctggtagaagtgaacagcggctcgctctacggcctcacggccctgcatcagctccacctcagcaacaattccatcgctcgcattcaccgcaagggctggagcttctgccagaagctgcatgagttggtcctgtccttcaacaacctgacacggctggacgaggagagcctggccgagctgagcagcctgagtgtcctgcgtctcagccacaattccatcagccacattgcggagggtgccttcaagggactcaggagcctgcgagtcttggatctggaccataacgagatttcgggcacaatagaggacacgagcggcgccttctcagggctcgacagcctcagcaagctgactctgtttggaaacaagatcaagtctgtggctaagagagcattctcggggctggaaggcctggagcacctgaaccttggagggaatgcgatcagatctgtccagtttgatgcctttgtgaagatgaagaatcttaaagagctccatatcagcagcgacagcttcctgtgtgactgccagctgaagtggctgcccccgtggctaattggcaggatgctgcaggcctttgtgacagccacctgtgcccacccagaatcactgaagggtcagagcattttctctgtgccaccagagagtttcgtgtgcgatgacttcctgaagccacagatcatcacccagccagaaaccaccatggctatggtgggcaaggacatccggtttacatgctcagcagccagcagcagcagctcccccatgacctttgcctggaagaaagacaatgaagtcctgaccaatgcagacatggagaactttgtccacgtccacgcgcaggacggggaagtgatggagtacaccaccatcctgcacctccgtcaggtcactttcgggcacgagggccgctaccaatgtgtcatcaccaaccactttggctccacctattcacataaggccaggctcaccgtgaatgtgttgccatcattcaccaaaacgccccacgacataaccatccggaccaccaccgtggcccgcctcgaatgtgctgccacaggtcacccaaaccctcagattgcctggcagaaggatggaggcacggatttccccgctgcccgtgagcgacgcatgcatgtcatgccggatgacgacgtgtttttcatcactgatgtgaaaatagatgacgcaggggtttacagctgtactgctcagaactcagccggttctatttcagctaatgccaccctgactgtcctagagaccccatccttggtggtccccttggaagaccgtgtggtatctgtgggagaaacagtggccctccaatgcaaagccacggggaaccctccgccccgcatcacctggttcaagggggaccgcccgctgagcctcactgagcggcaccacctgacccctgacaaccagctcctggtggttcagaacgtggtggcagaggatgcgggccgatatacctgtgagatgtccaacaccctgggcacggagcgagctcacagccagctgagcgtcctgcccgcagcaggctgcaggaaggatgggaccacggtaggcatcttcaccattgctgtcgtgagcagcatcgtcctgacgtcactggtctgggtgtgcatcatctaccagaccaggaagaagagtgaagagtacagtgtcaccaacacagatgaaaccgtcgtgccaccagatgttccaagctacctctcttctcaggggaccctttctgaccgacaagaaaccgtggtcaggaccgagggtggccctcaggccaatgggcacattgagagcaatggtgtgtgtccaagagatgcaagccactttccagagcccgacactcacagcgttgcctgcaggcagccaaagctctgtgctgggtctgcgtatcacaaagagccgtggaaagcgatggagaaagctgaagggacacctgggccacataagatggaacacggtggccgggtcgtatgcagtgactgcaacaccgaagtggactgttactccaggggacaagccttccacccccagcctgtgtccagagacagcgcacagccaagtgcgccaaatggcccggagccgggtgggagtgaccaagagcattctccacatcaccagtgcagcaggactgccgctgggtcctgccccgagtgccaagggtcgctctaccccagtaaccacgatagaatgctgacggctgtgaagaaaaagccaatggcatctctagatgggaaaggggattcttcctggactttagcaaggttgtatcacccggactccacagagctacagcctgcatcttcattaacttcaggcagtccagagcgcgcggaagcccagtacttgcttgtttccaatggccacctccccaaagcatgtgacgccagtcccgagtccacgccactgacaggacagctccccgggaaacagagggtgccactgctgttggcaccaaaaagctaggttttgtctacctcagttcttgtcataccaatctctacgggaaagagaggtaggagaggctgcgaggaagcttgggttcaagcgtcactcatctgtacatagttgtaactcccatgtggagtatcagtcgctcacaggacttggatctgaagcacagtaaacgcaagaggggatttgtgtacaaaaggcaaaaaaagtatttgatatcattgtacataagagttttcagagatttcatatatatcttttacagaggctattttaatctttagtgcatggttaacagaaaaaaattatacaattttgacaatattatttttcgtatcaggttgctgtttaattttggagggggtggggaaatagttctggtgccttaacgcatggctggaatttatagaggctacaaccacatttgttcacaggagtttttggtgcggggtgggaaggatggaaggccttggatttatattgcacttcatagacccctaggctgctgtgcggtgggactccacatgcgccggaaggagcttcaggtgagcactgctcatgtgtggatgcccctgcaacaggcttccctgtctgtagagccaggggtgcaagtgccatccacacttgcagtgaatggcttttccttttaggtttaagtcctgtctgtctgtaaggcgtagaatctgtccgtctgtaaggcgtagaatgagggttgttaatccatcacaagcaaaaggtcagaacagttaaacactgcctttcctcctcctcttattttatgataaaagcaaatgtggccttctcagtatcattcgattgctatttgagacttttaaattaaggtaaaggctgctggtgttggtacctgtggatttttctatactgatgttttcgttttgccaatataatgagtattacattggccttgggggacagaaaggaggaagttctgacttttcagggctaccttatttctactaaggacccagagcaggcctgtccatgccattccttcgcacagatgaaactgagctgggactggaaaggacagcccttgacctgggttctgggtataatttgcacttttgagactggtagctaaccatcttatgagtgccaatgtgtcatttagtaaaacttaaatagaaacaaggtccttcaaatgttcctttggccaaaagctgaagggagttactgagaaaatagttaacaattactgtcaggtgtcatcactgttcaaaaggtaagcacatttagaattttgttcttgacagttaactgactaatcttacttccacaaaatatgtgaatttgctgcttctgagaggcaatgtgaaagagggagtattacttttatgtacaaagttatttatttatagaaattttggtacagtgtacattgaaaaccatgtaaaatattgaagtgtctaacaaatggcattgaagtgtctttaataaaggttcatttataaatgtcagtatagttggtggtccttcttttacaaacgcagtcattctgcctttaattatcttcccccaaaaaagaaaaaaaaaataggcgaagcaaaatcacatactgtttgtttgctccagggcagacaacactgctagattcctgacattttgttttgaatttttctacacctggagcttgttagtcaaggtctaaaatccctaagtgtggtgacctttccatttcatcctgccttttcaaagctggcccaggccctcctttcagtctgacatgagaatggcgagaatggctcacccaccgtgccctcctgcacgaagccagctgggcccacctagtcacttgagttgcagctgctttctctcacacaccacagggggcgctggacacatctctgtaaaataatacaattgtgcgtttttatgggtgaaatctgagggtaattaaaaccagcagcctagttacccagaaagagtgcttgctatgcacctgtagttcaatctttctttctttttcaacaaagcctaccctt

SEQ ID NO: 111 - DNA, 4404 bp, Homo sapien
ggcgggactcttgctgcgcggaggagccgtgcggaacccgaggctgcgcgcgcgcgcgcgctctctggccgcggcgtggggacagcgaggcgcactggggcctcccagcgcggggccggccgcgccgtccagcccgaggtctacggctttgcgctccgagcccagaggaagatgcctgccggcaccgagctcgggctgcggggctgaacgcctgtcttccaggcgcagcggcagcactgccctcggccggtgtcggtagcggcactcggcgtgccccgggcggacgaagagcgcaggctgggtacaccttgcccgaatcggcggagttcgcagctagcgagggcgggccggccggcccggatgggcgcggggtttgcggcccccgccgggtgctccggagcggcccgggcaccgggggcacgctgagtgccggagccgcggccgcagagagaacttggggcgggggccatgccccggtgcggagtctagagccgagcggagcgccccgcgggcccgcccgcgtctgcggccgttcgggtcctcacagtccccgcgcccggagttcgcagcgcgctccagacaagatggcgcggccggtccggggagggctcggggccccgcgccgctcgccttgccttctccttctctggctgcttttgcttcggctggagccggtgaccgccgcggccggcccgcgggcgccctgcgcggccgcctgcacttgcgctggggactcgctggactgcggtgggcgcgggctggctgcgttgcccggggacctgccctcctggacgcggagcctaaacctgagttacaacaaactctctgagattgaccctgctggttttgaggacttgccgaacctacaggaagtgtacctcaataataatgagttgacagcggtaccatccctgggcgctgcttcatcacatgtcgtctctctctttctgcagcacaacaagattcgcagcgtggaggggagccagctgaaggcctacctttccttagaagtgttagatctgagtttgaacaacatcacggaagtgcggaacacctgctttccacacggaccgcctataaaggagctcaacctggcaggcaatcggattggcaccctggagttgggagcatttgatggtctgtcacggtcgctgctaactcttcgcctgagcaaaaacaggatcacccagcttcctgtaagagcattcaagctacccaggctgacacaactggacctcaatcggaacaggattcggctgatagagggcctcaccttccaggggctcaacagcttggaggtgctgaagcttcagcgaaacaacatcagcaaactgacagatggggccttctggggactgtccaagatgcatgtgctgcacctggagtacaacagcctggtagaagtgaacagcggctcgctctacggcctcacggccctgcatcagctccacctcagcaacaattccatcgctcgcattcaccgcaagggctggagcttctgccagaagctgcatgagttggtcctgtccttcaacaacctgacacggctggacgaggagagcctggccgagctgagcagcctgagtgtcctgcgtctcagccacaattccatcagccacattgcggagggtgccttcaagggactcaggagcctgcgagtcttggatctggaccataacgagatttcgggcacaatagaggacacgagcggcgccttctcagggctcgacagcctcagcaagctgactctgtttggaaacaagatcaagtctgtggctaagagagcattctcggggctggaaggcctggagcacctgaaccttggagggaatgcgatcagatctgtccagtttgatgcctttgtgaagatgaagaatcttaaagagctccatatcagcagcgacagcttcctgtgtgactgccagctgaagtggctgcccccgtggctaattggcaggatgctgcaggcctttgtgacagccacctgtgcccacccagaatcactgaagggtcagagcattttctctgtgccaccagagagtttcgtgtgcgatgacttcctgaagccacagatcatcacccagccagaaaccaccatggctatggtgggcaaggacatccggtttacatgctcagcagccagcagcagcagctcccccatgacctttgcctggaagaaagacaatgaagtcctgaccaatgcagacatggagaactttgtccacgtccacgcgcaggacggggaagtgatggagtacaccaccatcctgcacctccgtcaggtcactttcgggcacgagggccgctaccaatgtgtcatcaccaaccactttggctccacctattcacataaggccaggctcaccgtgaatgtgttgccatcattcaccaaaacgccccacgacataaccatccggaccaccaccgtggcccgcctcgaatgtgctgccacaggtcacccaaaccctcagattgcctggcagaaggatggaggcacggatttccccgctgcccagaccccatccttggtggtccccttggaagaccgtgtggtatctgtgggagtgaccaagagcattctccacatcaccagtgcagcaggactgccgctgggtcctgccccgagtgccaagggtcgctctaccccagtaaccacgatagaatgctgacggctgtgaagaaaaagccaatggcatctctagatgggaaaggggattcttcctggactttagcaaggttgtatcacccggactccacagagctacagcctgcatcttcattaacttcaggcagtccagagcgcgcggaagcccagtacttgcttgtttccaatggccacctccccaaagcatgtgacgccagtcccgagtccacgccactgacaggacagctccccgggaaacagagggtgccactgctgttggcaccaaaaagctaggttttgtctacctcagttcttgtcataccaatctctacgggaaagagaggtaggagaggctgcgaggaagcttgggttcaagcgtcactcatctgtacatagttgtaactcccatgtggagtatcagtcgctcacaggacttggatctgaagcacagtaaacgcaagaggggatttgtgtacaaaaggcaaaaaaagtatttgatatcattgtacataagagttttcagagatttcatatatatcttttacagaggctattttaatctttagtgcatggttaacagaaaaaaattatacaattttgacaatattatttttcgtatcaggttgctgtttaattttggagggggtggggaaatagttctggtgccttaacgcatggctggaatttatagaggctacaaccacatttgttcacaggagtttttggtgcggggtgggaaggatggaaggccttggatttatattgcacttcatagacccctaggctgctgtgcggtgggactccacatgcgccggaaggagcttcaggtgagcactgctcatgtgtggatgcccctgcaacaggcttccctgtctgtagagccaggggtgcaagtgccatccacacttgcagtgaatggcttttccttttaggtttaagtcctgtctgtctgtaaggcgtagaatctgtccgtctgtaaggcgtagaatgagggttgttaatccatcacaagcaaaaggtcagaacagttaaacactgcctttcctcctcctcttattttatgataaaagcaaatgtggccttctcagtatcattcgattgctatttgagacttttaaattaaggtaaaggctgctggtgttggtacctgtggatttttctatactgatgttttcgttttgccaatataatgagtattacattggccttgggggacagaaaggaggaagttctgacttttcagggctaccttatttctactaaggacccagagcaggcctgtccatgccattccttcgcacagatgaaactgagctgggactggaaaggacagcccttgacctgggttctgggtataatttgcacttttgagactggtagctaaccatcttatgagtgccaatgtgtcatttagtaaaacttaaatagaaacaaggtccttcaaatgttcctttggccaaaagctgaagggagttactgagaaaatagttaacaattactgtcaggtgtcatcactgttcaaaaggtaagcacatttagaattttgttcttgacagttaactgactaatcttacttccacaaaatatgtgaatttgctgcttctgagaggcaatgtgaaagagggagtattacttttatgtacaaagttatttatttatagaaattttggtacagtgtacattgaaaaccatgtaaaatattgaagtgtctaacaaatggcattgaagtgtctttaataaaggttcatttataaatgtca

SEQ ID NO: 112 - DNA, 4751 bp, Homo sapien
ggcgggactcttgctgcgcggaggagccgtgcggaacccgaggctgcgcgcgcgcgcgcgctctctggccgcggcgtggggacagcgaggcgcactggggcctcccagcgcggggccggccgcgccgtccagcccgaggtctacggctttgcgctccgagcccagaggaagatgcctgccggcaccgagctcgggctgcggggctgaacgcctgtcttccaggcgcagcggcagcactgccctcggccggtgtcggtagcggcactcggcgtgccccgggcggacgaagagcgcaggctgggtacaccttgcccgaatcggcggagttcgcagctagcgagggcgggccggccggcccggatgggcgcggggtttgcggcccccgccgggtgctccggagcggcccgggcaccgggggcacgctgagtgccggagccgcggccgcagagagaacttggggcgggggccatgccccggtgcggagtctagagccgagcggagcgccccgcgggcccgcccgcgtctgcggccgttcgggtcctcacagtccccgcgcccggagttcgcagcgcgctccagacaagatggcgcggccggtccggggagggctcggggccccgcgccgctcgccttgccttctccttctctggctgcttttgcttcggctggagccggtgaccgccgcggccggcccgcgggcgccctgcgcggccgcctgcacttgcgctggggactcgctggactgcggtgggcgcgggctggctgcgttgcccggggacctgccctcctggacgcggagcctaaacctgagttacaacaaactctctgagattgaccctgctggttttgaggacttgccgaacctacaggaagtgtacctcaataataatgagttgacagcggtaccatccctgggcgctgcttcatcacatgtcgtctctctctttctgcagcacaacaagattcgcagcgtggaggggagccagctgaaggcctacctttccttagaagtgttagatctgagtttgaacaacatcacggaagtgcggaacacctgctttccacacggaccgcctataaaggagctcaacctggcaggcaatcggattggcaccctggagttgggagcatttgatggtctgtcacggtcgctgctaactcttcgcctgagcaaaaacaggatcacccagcttcctgtaagagcattcaagctacccaggctgacacaactggacctcaatcggaacaggattcggctgatagagggcctcaccttccaggggctcaacagcttggaggtgctgaagcttcagcgaaacaacatcagcaaactgacagatggggccttctggggactgtccaagatgcatgtgctgcacctggagtacaacagcctggtagaagtgaacagcggctcgctctacggcctcacggccctgcatcagctccacctcagcaacaattccatcgctcgcattcaccgcaagggctggagcttctgccagaagctgcatgagttggtcctgtccttcaacaacctgacacggctggacgaggagagcctggccgagctgagcagcctgagtgtcctgcgtctcagccacaattccatcagccacattgcggagggtgccttcaagggactcaggagcctgcgagtcttggatctggaccataacgagatttcgggcacaatagaggacacgagcggcgccttctcagggctcgacagcctcagcaagctgactctgtttggaaacaagatcaagtctgtggctaagagagcattctcggggctggaaggcctggagcacctgaaccttggagggaatgcgatcagatctgtccagtttgatgcctttgtgaagatgaagaatcttaaagagctccatatcagcagcgacagcttcctgtgtgactgccagctgaagtggctgcccccgtggctaattggcaggatgctgcaggcctttgtgacagccacctgtgcccacccagaatcactgaagggtcagagcattttctctgtgccaccagagagtttcgtgtgcgatgacttcctgaagccacagatcatcacccagccagaaaccaccatggctatggtgggcaaggacatccggtttacatgctcagcagccagcagcagcagctcccccatgacctttgcctggaagaaagacaatgaagtcctgaccaatgcagacatggagaactttgtccacgtccacgcgcaggacggggaagtgatggagtacaccaccatcctgcacctccgtcaggtcactttcgggcacgagggccgctaccaatgtgtcatcaccaaccactttggctccacctattcacataaggccaggctcaccgtgaatgtgttgccatcattcaccaaaacgccccacgacataaccatccggaccaccaccgtggcccgcctcgaatgtgctgccacaggtcacccaaaccctcagattgcctggcagaaggatggaggcacggatttccccgctgcccgtgagcgacgcatgcatgtcatgccggatgacgacgtgtttttcatcactgatgtgaaaatagatgacgcaggggtttacagctgtactgctcagaactcagccggttctatttcagctaatgccaccctgactgtcctagagaccccatccttggtggtccccttggaagaccgtgtggtatctgtgggagaaacagtggccctccaatgcaaagccacggggaaccctccgccccgcatcacctggttcaagggggaccgcccgctgagcctcactgagcggcaccacctgacccctgacaaccagctcctggtggttcagaacgtggtggcagaggatgcgggccgatatacctgtgagatgtccaacaccctgggcacggagcgagctcacagccagctgagcgtcctgcccgcagcaggctgcaggaaggatgggaccacggtaggcatcttcaccattgctgtcgtgagcagcatcgtcctgacgtcactggtctgggtgtgcatcatctaccagaccaggaagaagagtgaagagtacagtgtcaccaacacagatgaaaccgtcgtgccaccagatgttccaagctacctctcttctcaggggaccctttctgaccgacaagaaaccgtggtcaggaccgagggtggccctcaggccaatgggcacattgagagcaatggtgtgtgtccaagagatgcaagccactttccagagcccgacactcacagcgttgcctgcaggcagccaaagctctgtgctgggtctgcgtatcacaaagagccgtggaaagcgatggagaaagctgaagggacacctgggccacataagatggaacacggtggccgggtcgtatgcagtgactgcaacaccgaagtggactgttactccaggggacaagccttccacccccagcctgtgtccagagacagcgcacagccaagtgcgccaaatggcccggagccgggtgggagtgaccaagagcattctccacatcaccagtgcagcaggactgccgctgggtcctgccccgagtgccaagggtcgctctaccccagtaaccacgatagaatgctgacggctgtgaagaaaaagccaatggcatctctagatgggaaaggggattcttcctggactttagcaaggttgtatcacccggactccacagagctacagcctgcatcttcattaacttcaggcagtccagagcgcgcggaagcccagtacttgcttgtttccaatggccacctccccaaagcatgtgacgccagtcccgagtccacgccactgacaggacagctccccgggaaacagagggtgccactgctgttggcaccaaaaagctaggttttgtctacctcagttcttgtcataccaatctctacgggaaagagaggtaggagaggctgcgaggaagcttgggttcaagcgtcactcatctgtacatagttgtaactcccatgtggagtatcagtcgctcacaggacttggatctgaagcacagtaaacgcaagaggggatttgtgtacaaaaggcaaaaaaagtatttgatatcattgtacataagagttttcagagatttcatatatatcttttacagaggctattttaatctttagtgcatggttaacagaaaaaaattatacaattttgacaatattatttttcgtatcaggttgctgtttaattttggagggggtggggaaatagttctggtgccttaacgcatggctggaatttatagaggctacaaccacatttgttcacaggagtttttggtgcggggtgggaaggatggaaggccttggatttatattgcacttcatagacccctaggctgctgtgcggtgggactccacatgcgccggaaggagcttcaggtgagcactgctcatgtgtggatgcccctgcaacaggcttccctgtctgtagagccaggggtgcaagtgccatccacacttgcagtgaatggcttttccttttaggtttaagtcctgtctgtctgtaaggcgtagaatctgtccgtctgtaaggcgtagaatgagggttgttaatccatcacaagcaaaaggtcagaacagttaaacactgcctttcctcctcctcttattttatgataaaagcaaatgtggccttctcagtatcattcgattgctatttgagacttttaaattaaggtaaaggctgctggtgttggtacctgtggatttcggccgcgaccacgctaagggc

SEQ ID NO: 113 - DNA, 3368 bp, Homo sapien
ggcgggactcttgctgcgcggaggagccgtgcggaacccgaggctgcgcgcgcgcgcgcgctctctggccgcggcgtggggacagcgaggcgcactggggcctcccagcgcggggccggccgcgccgtccagcccgaggtctacggctttgcgctccgagcccagaggaagatgcctgccggcaccgagctcgggctgcggggctgaacgcctgtcttccaggcgcagcggcagcactgccctcggccggtgtcggtagcggcactcggcgtgccccgggcggacgaagagcgcaggctgggtacaccttgcccgaatcggcggagttcgcagctagcgagggcgggccggccggcccggatgggcgcggggtttgcggcccccgccgggtgctccggagcggcccgggcaccgggggcacgctgagtgccggagccgcggccgcagagagaacttggggcgggggccatgccccggtgcggagtctagagccgagcggagcgccccgcgggcccgcccgcgtctgcggccgttcgggtcctcacagtccccgcgcccggagttcgcagcgcgctccagacaagatggcgcggccggtccggggagggctcggggccccgcgccgctcgccttgccttctccttctctggctgcttttgcttcggctggagccggtgaccgccgcggccggcccgcgggcgccctgcgcggccgcctgcacttgcgctggggactcgctggactgcggtgggcgcgggctggctgcgttgcccggggacctgccctcctggacgcggagcctaaacctgagttacaacaaactctctgagattgaccctgctggttttgaggacttgccgaacctacaggaagtgtacctcaataataatgagttgacagcggtaccatccctgggcgctgcttcatcacatgtcgtctctctctttctgcagcacaacaagattcgcagcgtggaggggagccagctgaaggcctacctttccttagaagtgttagatctgagtttgaacaacatcacggaagtgcggaacacctgctttccacacggaccgcctataaaggagctcaacctggcaggcaatcggattggcaccctggagttgggagcatttgatggtctgtcacggtcgctgctaactcttcgcctgagcaaaaacaggatcacccagcttcctgtaagagcattcaagctacccaggctgacacaactggacctcaatcggaacaggattcggctgatagagggcctcaccttccaggggctcaacagcttggaggtgctgaagcttcagcgaaacaacatcagcaaactgacagatggggccttctggggactgtccaagatgcatgtgctgcacctggagtacaacagcctggtagaagtgaacagcggctcgctctacggcctcacggccctgcatcagctccacctcagcaacaattccatcgctcgcattcaccgcaagggctggagcttctgccagaagctgcatgagttggtcctgtccttcaacaacctgacacggctggacgaggagagcctggccgagctgagcagcctgagtgtcctgcgtctcagccacaattccatcagccacattgcggagggtgccttcaagggactcaggagcctgcgagtcttggatctggaccataacgagatttcgggcacaatagaggacacgagcggcgccttctcagggctcgacagcctcagcaagctgactctgtttggaaacaagatcaagtctgtggctaagagagcattctcggggctggaaggcctggagcacctgaaccttggagggaatgcgatcagatctgtccagtttgatgcctttgtgaagatgaagaatcttaaagagctccatatcagcagcgacagcttcctgtgtgactgccagctgaagtggctgcccccgtggctaattggcaggatgctgcaggcctttgtgacagccacctgtgcccacccagaatcactgaagggtcagagcattttctctgtgccaccagagagtttcgtgtgcgatgacttcctgaagccacagatcatcacccagccagaaaccaccatggctatggtgggcaaggacatccggtttacatgctcagcagccagcagcagcagctcccccatgacctttgcctggaagaaagacaatgaagtcctgaccaatgcagacatggagaactttgtccacgtccacgcgcaggacggggaagtgatggagtacaccaccatcctgcacctccgtcaggtcactttcgggcacgagggccgctaccaatgtgtcatcaccaaccactttggctccacctattcacataaggccaggctcaccgtgaatgtgttgccatcattcaccaaaacgccccacgacataaccatccggaccaccaccgtggcccgcctcgaatgtgctgccacaggtcacccaaaccctcagattgcctggcagaaggatggaggcacggatttccccgctgcccgtgagcgacgcatgcatgtcatgccggatgacgacgtgtttttcatcactgatgtgaaaatagatgacgcaggggtttacagctgtactgctcagaactcagccggttctatttcagctaatgccaccctgactgtcctagagaccccatccttggtggtccccttggaagaccgtgtggtatctgtgggagaaacagtggccctccaatgcaaagccacggggaaccctccgccccgcatcacctggttcaagggggaccgcccgctgagcctcactgagcggcaccacctgacccctgacaaccagctcctggtggttcagaacgtggtggcagaggatgcgggccgatatacctgtgagatgtccaacaccctgggcacggagcgagctcacagccagctgagcgtcctgcccgcagcaggctgcaggaaggatgggaccacggtaggcatcttcaccattgctgtcgtgagcagcatcgtcctgacgtcactggtctgggtgtgcatcatctaccagaccaggaagaagagtgaagagtacagtgtcaccaacacagatgaaaccgtcgtgccaccagatgttccaagctacctctcttctcaggggaccctttctgaccgacaagaaaccgtggtcaggaccgagggtggccctcaggccaatgggcacattgagagcaatggtaaggcctcagtaaccgtgaagcagagctctgctgtgactgtgtctctgggtgctggaggtggcctccaggtctttacagggcaggtacctggcattagatggggcttggtcaagaataaggacacaggcctgacacaggacagttagggaatagcaggggctttt

SEQ ID NO: 114 - DNA, 2620 bp, Homo sapien
ggcgggactcttgctgcgcggaggagccgtgcggaacccgaggctgcgcgcgcgcgcgcgctctctggccgcggcgtggggacagcgaggcgcactggggcctcccagcgcggggccggccgcgccgtccagcccgaggtctacggctttgcgctccgagcccagaggaagatgcctgccggcaccgagctcgggctgcggggctgaacgcctgtcttccaggcgcagcggcagcactgccctcggccggtgtcggtagcggcactcggcgtgccccgggcggacgaagagcgcaggctgggtacaccttgcccgaatcggcggagttcgcagctagcgagggcgggccggccggcccggatgggcgcggggtttgcggcccccgccgggtgctccggagcggcccgggcaccgggggcacgctgagtgccggagccgcggccgcagagagaacttggggcgggggccatgccccggtgcggagtctagagccgagcggagcgccccgcgggcccgcccgcgtctgcggccgttcgggtcctcacagtccccgcgcccggagttcgcagcgcgctccagacaagatggcgcggccggtccggggagggctcggggccccgcgccgctcgccttgccttctccttctctggctgcttttgcttcggctggagccggtgaccgccgcggccggcccgcgggcgccctgcgcggccgcctgcacttgcgctggggactcgctggactgcggtgggcgcgggctggctgcgttgcccggggacctgccctcctggacgcggagcctaaacctgagttacaacaaactctctgagattgaccctgctggttttgaggacttgccgaacctacaggaagtgtacctcaataataatgagttgacagcggtaccatccctgggcgctgcttcatcacatgtcgtctctctctttctgcagcacaacaagattcgcagcgtggaggggagccagctgaaggcctacctttccttagaagtgttagatctgagtttgaacaacatcacggaagtgcggaacacctgctttccacacggaccgcctataaaggagctcaacctggcaggcaatcggattggcaccctggagttgggagcatttgatggtctgtcacggtcgctgctaactcttcgcctgagcaaaaacaggatcacccagcttcctgtaagagcattcaagctacccaggctgacacaactggacctcaatcggaacaggattcggctgatagagggcctcaccttccaggggctcaacagcttggaggtgctgaagcttcagcgaaacaacatcagcaaactgacagatggggccttctggggactgtccaagatgcatgtgctgcacctggagtacaacagcctggtagaagtgaacagcggctcgctctacggcctcacggccctgcatcagctccacctcagcaacaattccatcgctcgcattcaccgcaagggctggagcttctgccagaagctgcatgagttggtcctgtccttcaacaacctgacacggctggacgaggagagcctggccgagctgagcagcctgagtgtcctgcgtctcagccacaattccatcagccacattgcggagggtgccttcaagggactcaggagcctgcgagtcttggatctggaccataacgagatttcgggcacaatagaggacacgagcggcgccttctcagggctcgacagcctcagcaagctgactctgtttggaaacaagatcaagtctgtggctaagagagcattctcggggctggaaggcctggagcacctgaaccttggagggaatgcgatcagatctgtccagtttgatgcctttgtgaagatgaagaatcttaaagagctccatatcagcagcgacagcttcctgtgtgactgccagctgaagtggctgcccccgtggctaattggcaggatgctgcaggcctttgtgacagccacctgtgcccacccagaatcactgaagggtcagagcattttctctgtgccaccagagagtttcgtgtgcgatgacttcctgaagccacagatcatcacccagccagaaaccaccatggctatggtgggcaaggacatccggtttacatgctcagcagccagcagcagcagctcccccatgacctttgcctggaagaaagacaatgaagtcctgaccaatgcagacatggagaactttgtccacgtccacgcgcaggacggggaagtgatggagtacaccaccatcctgcacctccgtcaggtcactttcgggcacgagggccgctaccaatgtgtcatcaccaaccactttggctccacctattcacataaggccaggctcaccgtgaatgtgttgccatcattcaccaaaacgccccacgacataaccatccggaccaccaccgtggcccgcctcgaatgtgctgccacaggtcacccaaaccctcagattgcctggcagaaggatggaggcacggatttccccgctgcccgtgagcgacgcatgcatgtcatgccggatgacgacgtgtttttcatcactgatgtgaaaatagatgacgcaggtgggtactactgggttaattgcaggtggtactt

SEQ ID NO: 115 - DNA, 2747 bp, Homo sapien
ggcgggactcttgctgcgcggaggagccgtgcggaacccgaggctgcgcgcgcgcgcgcgctctctggccgcggcgtggggacagcgaggcgcactggggcctcccagcgcggggccggccgcgccgtccagcccgaggtctacggctttgcgctccgagcccagaggaagatgcctgccggcaccgagctcgggctgcggggctgaacgcctgtcttccaggcgcagcggcagcactgccctcggccggtgtcggtagcggcactcggcgtgccccgggcggacgaagagcgcaggctgggtacaccttgcccgaatcggcggagttcgcagctagcgagggcgggccggccggcccggatgggcgcggggtttgcggcccccgccgggtgctccggagcggcccgggcaccgggggcacgctgagtgccggagccgcggccgcagagagaacttggggcgggggccatgccccggtgcggagtctagagccgagcggagcgccccgcgggcccgcccgcgtctgcggccgttcgggtcctcacagtccccgcgcccggagttcgcagcgcgctccagacaagatggcgcggccggtccggggagggctcggggccccgcgccgctcgccttgccttctccttctctggctgcttttgcttcggctggagccggtgaccgccgcggccggcccgcgggcgccctgcgcggccgcctgcacttgcgctggggactcgctggactgcggtgggcgcgggctggctgcgttgcccggggacctgccctcctggacgcggagcctaaacctgagttacaacaaactctctgagattgaccctgctggttttgaggacttgccgaacctacaggaagtgtacctcaataataatgagttgacagcggtaccatccctgggcgctgcttcatcacatgtcgtctctctctttctgcagcacaacaagattcgcagcgtggaggggagccagctgaaggcctacctttccttagaagtgttagatctgagtttgaacaacatcacggaagtgcggaacacctgctttccacacggaccgcctataaaggagctcaacctggcaggcaatcggattggcaccctggagttgggagcatttgatggtctgtcacggtcgctgctaactcttcgcctgagcaaaaacaggatcacccagcttcctgtaagagcattcaagctacccaggctgacacaactggacctcaatcggaacaggattcggctgatagagggcctcaccttccaggggctcaacagcttggaggtgctgaagcttcagcgaaacaacatcagcaaactgacagatggggccttctggggactgtccaagatgcatgtgctgcacctggagtacaacagcctggtagaagtgaacagcggctcgctctacggcctcacggccctgcatcagctccacctcagcaacaattccatcgctcgcattcaccgcaagggctggagcttctgccagaagctgcatgagttggtcctgtccttcaacaacctgacacggctggacgaggagagcctggccgagctgagcagcctgagtgtcctgcgtctcagccacaattccatcagccacattgcggagggtgccttcaagggactcaggagcctgcgagtcttggatctggaccataacgagatttcgggcacaatagaggacacgagcggcgccttctcagggctcgacagcctcagcaagctgactctgtttggaaacaagatcaagtctgtggctaagagagcattctcggggctggaaggcctggagcacctgtgagtatctcaccagccctgccctgaggcacagcctgctgaatgcggctgccggggagttctgctagcaatttaatcgcatctttgtaaactgagaaacaggctatttggaaacaccagctgcttccttctcattatgtcagcttcagctttggcctttatgttgcctatgccaggaacagttacagaacatatggccagtggatgtgctcccagttaattcagttggtatttggataaataccctccccgctcctgctgcgcagcctaacccctgcactggctccttcatggacccctggcctcattgcctcttccaccaacgcgcttcctcctggccaagcctgttgcctccattaaagcagcttaacaatgcagagtaggtgctgggctgaaccagtttggtgtggttgcttctgagaccctgggaggaagggaacagagccacccgagacagtcatgctgttgccatctggggaggatgcctcatgtatgtgattcttagtttgtttcctctttgaatcaagtttgactctaactctgttgggaaaggttttgccttgctgagcaggcctcagcccagctttgatggtgccctaaggctggcttggctcctgagtcattccatgggcttgtgttgcgatttgggaaacaacagccacttatagtagttaggacacaggtctggctagtccctgtgggtcatctgtgaaaccaggactgtcctgaaaacccctcaggtgtacctagggtttctttgcataagtaatgtatgttctgtttcaggaaccttggagggaatgcgatcagatctgtccagtttgatgcctttgtgaagatgaagaatcttaaagagctgtaagtatctggattccctgggtctgattaatggtagtggagactttcagagtaagaaacttctgcaattgca

SEQ ID NO: 116 - DNA, 5332 bp, Homo sapien
ggcgggactcttgctgcgcggaggagccgtgcggaacccgaggctgcgcgcgcgcgcgcgctctctggccgcggcgtggggacagcgaggcgcactggggcctcccagcgcggggccggccgcgccgtccagcccgaggtctacggctttgcgctccgagcccagaggaagatgcctgccggcaccgagctcgggctgcggggctgaacgcctgtcttccaggcgcagcggcagcactgccctcggccggtgtcggtagcggcactcggcgtgccccgggcggacgaagagcgcaggctgggtacaccttgcccgaatcggcggagttcgcagctagcgagggcgggccggccggcccggatgggcgcggggtttgcggcccccgccgggtgctccggagcggcccgggcaccgggggcacgctgagtgccggagccgcggccgcagagagaacttggggcgggggccatgccccggtgcggagtctagagccgagcggagcgccccgcgggcccgcccgcgtctgcggccgttcgggtcctcacagtccccgcgcccggagttcgcagcgcgctccagacaagatggcgcggccggtccggggagggctcggggccccgcgccgctcgccttgccttctccttctctggctgcttttgcttcggctggagccggtgaccgccgcggccggcccgcgggcgccctgcgcggccgcctgcacttgcgctggggactcgctggactgcggtgggcgcgggctggctgcgttgcccggggacctgccctcctggacgcggagcctaaacctgagttacaacaaactctctgagattgaccctgctggttttgaggacttgccgaacctacaggaagtgtacctcaataataatgagttgacagcggtaccatccctgggcgctgcttcatcacatgtcgtctctctctttctgcagcacaacaagattcgcagcgtggaggggagccagctgaaggcctacctttccttagaagtgttagatctgagtttgaacaacatcacggaagtgcggaacacctgctttccacacggaccgcctataaaggagctcaacctggcaggcaatcggattggcaccctggagttgggagcatttgatggtctgtcacggtcgctgctaactcttcgcctgagcaaaaacaggatcacccagcttcctgtaagagcattcaagctacccaggctgacacaactggacctcaatcggaacaggattcggctgatagagggcctcaccttccaggggctcaacagcttggaggtgctgaagcttcagcgaaacaacatcagcaaactgacagatggggccttctggggactgtccaagatgcatgtgctgcacctggagtacaacagcctggtagaagtgaacagcggctcgctctacggcctcacggccctgcatcagctccacctcagcaacaattccatcgctcgcattcaccgcaagggctggagcttctgccagaagctgcatgagttggtcctgtccttcaacaacctgacacggctggacgaggagagcctggccgagctgagcagcctgagtgtcctgcgtctcagccacaattccatcagccacattgcggagggtgccttcaagggactcaggagcctgcgagtcttggatctggaccataacgagatttcgggcacaatagaggacacgagcggcgccttctcagggctcgacagcctcagcaagctgactctgtttggaaacaagatcaagtctgtggctaagagagcattctcggggctggaaggcctggagcacctgaaccttggagggaatgcgatcagatctgtccagtttgatgcctttgtgaagatgaagaatcttaaagagctccatatcagcagcgacagcttcctgtgtgactgccagctgaagtggctgcccccgtggctaattggcaggatgctgcaggcctttgtgacagccacctgtgcccacccagaatcactgaagggtcagagcattttctctgtgccaccagagagtttcgtgtgcgatgacttcctgaagccacagatcatcacccagccagaaaccaccatggctatggtgggcaaggacatccggtttacatgctcagcagccagcagcagcagctcccccatgacctttgcctggaagaaagacaatgaagtcctgaccaatgcagacatggagaactttgtccacgtccacgcgcaggacggggaagtgatggagtacaccaccatcctgcacctccgtcaggtcactttcgggcacgagggccgctaccaatgtgtcatcaccaaccactttggctccacctattcacataaggccaggctcaccgtgaatgtgttgccatcattcaccaaaacgccccacgacataaccatccggaccaccaccgtggcccgcctcgaatgtgctgccacaggtcacccaaaccctcagattgcctggcagaaggatggaggcacggatttccccgctgcccgtgagcgacgcatgcatgtcatgccggatgacgacgtgtttttcatcactgatgtgaaaatagatgacgcaggggtttacagctgtactgctcagaactcagccggttctatttcagctaatgccaccctgactgtcctagagaccccatccttggtggtccccttggaagaccgtgtggtatctgtgggagaaacagtggccctccaatgcaaagccacggggaaccctccgccccgcatcacctggttcaagggggaccgcccgctgagcctcactgagcggcaccacctgacccctgacaaccagctcctggtggttcagaacgtggtggcagaggatgcgggccgatatacctgtgagatgtccaacaccctgggcacggagcgagctcacagccagctgagcgtcctgcccgcagcaggctgcaggaaggatgggaccacggtaggcatcttcaccattgctgtcgtgagcagcatcgtcctgacgtcactggtctgggtgtgcatcatctaccagaccaggaagaagagtgaagagtacagtgtcaccaacacagatgaaaccgtcgtgccaccagatgttccaagctacctctcttctcaggggaccctttctgaccgacaagaaaccgtggtcaggaccgagggtggccctcaggccaatgggcacattgagagcaatggtgtgtgtccaagagatgcaagccactttccagagcccgacactcacagcgttgcctgcaggcagccaaagctctgtgctgggtctgcgtatcacaaagagccgtggaaagcgatggagaaagctgaagggacacctgggccacataagatggaacacggtggccgggtcgtatgcagtgactgcaacaccgaagtggactgttactccaggggacaagccttccacccccagcctgtgtccagagacagcgcacagccaagtgcgccaaatggcccggagccgggtgggagtgaccaagagcattctccacatcaccagtgcagcaggactgccgctgggtcctgccccgagtgccaagggtcgctctaccccagtaaccacgatagaatgctgacggctgtgaagaaaaagccaatggcatctctagatgggaaaggggattcttcctggactttagcaaggttgtatcacccggactccacagagctacagcctgcatcttcattaacttcaggcagtccagagcgcgcggaagcccagtacttgcttgtttccaatggccacctccccaaagcatgtgacgccagtcccgagtccacgccactgacaggacagctccccgggaaacagagggtgccactgctgttggcaccaaaaagctaggttttgtctacctcagttcttgtcataccaatctctacgggaaagagaggtaggagaggctgcgaggaagcttgggttcaagcgtcactcatctgtacatagttgtaactcccatgtggagtatcagtcgctcacaggacttggatctgaagcacagtaaacgcaagaggggatttgtgtacaaaaggcaaaaaaagtatttgatatcattgtacataagagttttcagagatttcatatatatcttttacagaggctattttaatctttagtgcatggttaacagaaaaaaattatacaattttgacaatattatttttcgtatcaggttgctgtttaattttggagggggtggggaaatagttctggtgccttaacgcatggctggaatttatagaggctacaaccacatttgttcacaggagtttttggtgcggggtgggaaggatggaaggccttggatttatattgcacttcatagacccctaggctgctgtgcggtgggactccacatgcgccggaaggagcttcaggtgagcactgctcatgtgtggatgcccctgcaacaggcttccctgtctgtagagccaggggtgcaagtgccatccacacttgcagtgaatggcttttccttttaggtttaagtcctgtctgtctgtaaggcgtagaatctgtccgtctgtaaggcgtagaatgagggttgttaatccatcacaagcaaaaggtcagaacagttaaacactgcctttcctcctcctcttattttatgataaaagcaaatgtggccttctcagtatcattcgattgctatttgagacttttaaattaaggtaaaggctgctggtgttggtacctgtggatttttctatactgatgttttcgttttgccaatataatgagtattacattggccttgggggacagaaaggaggaagttctgacttttcagggctaccttatttctactaaggacccagagcaggcctgtccatgccattccttcgcacagatgaaactgagctgggactggaaaggacagcccttgacctgggttctgggtataatttgcacttttgagactggtagctaaccatcttatgagtgccaatgtgtcatttagtaaaacttaaatagaaacaaggtccttcaaatgttcctttggccaaaagctgaagggagttactgagaaaatagttaacaattactgtcaggtgtcatcactgttcaaaaggtaagcacatttagaattttgttcttgacagttaactgactaatcttacttccacaaaatatgtgaatttgctgcttctgagaggcaatgtgaaagagggagtattacttttatgtacaaagttatttatttatagaaattttggtacagtgtacattgaaaaccatgtaaaatattgaagtgtctaacaaatggcattgaagtgtctttaataaaggttcatttataaatgtca

SEQ ID NO: 117 - DNA, 1379 bp, Homo sapien
ggcgggactcttgctgcgcggaggagccgtgcggaacccgaggctgcgcgcgcgcgcgcgctctctggccgcggcgtggggacagcgaggcgcactggggcctcccagcgcggggccggccgcgccgtccagcccgaggtctacggctttgcgctccgagcccagaggaagatgcctgccggcaccgagctcgggctgcggggctgaacgcctgtcttccaggcgcagcggcagcactgccctcggccggtgtcggtagcggcactcggcgtgccccgggcggacgaagagcgcaggctgggtacaccttgcccgaatcggcggagttcgcagctagcgagggcgggccggccggcccggatgggcgcggggtttgcggcccccgccgggtgctccggagcggcccgggcaccgggggcacgctgagtgccggagccgcggccgcagagagaacttggggcgggggccatgccccggtgcggagtctagagccgagcggagcgccccgcgggcccgcccgcgtctgcggccgttcgggtcctcacagtccccgcgcccggagttcgcagcgcgctccagacaagatggcgcggccggtccggggagggctcggggccccgcgccgctcgccttgccttctccttctctggctgcttttgcttcggctggagccggtgaccgccgcggccggcccgcgggcgccctgcgcggccgcctgcacttgcgctggggactcgctggactgcggtgggcgcgggctggctgcgttgcccggggacctgccctcctggacgcggagcctaaacctgagttacaacaaactctctgagattgaccctgctggttttgaggacttgccgaacctacaggaagtgtacctcaataataatgagttgacagcggtaccatccctgggcgctgcttcatcacatgtcgtctctctctttctagtacgtactacactacaaacaacagcacaacaaaaaaccacacaagaggggaaggccagcgagaaggagcctaccgaagacgcaaagaagtgaagaaagaacaagaggaagagaagcaagcagacacgggaagagagcggaacaccgagcgaagaccacacgaggacccgccgaagaaaagggaggcacaagccgaggcaggcaagacaggaaaggcacccaagatgaaagggagcagaagagaagggtagaagacacgagacggcagcgaaaacgacagacgtccgagaagcaaaaaaaccaagaaacaacccccagcaaaccaagaaaagaaacaaaaacaagagcaaccccagagcgaaacacagatgaaggacccacaaagacggaacacgaaaaaacgtgcgaaagaaaaaagggccacaccca

SEQ ID NO: 118 - DNA, 985 bp, Homo sapien
tgtgtggccaggggtggtatgcgttgtgggcctttcgaccctgtttgaaatttggggctgctttttgagttgagttaatttttcttaaacaagtgtaatctatctctttaaaagaaatgatagctggtgaattaagagtcttcatagggtttagctactgctccagagactgtggagtgcaaggctggtgtgagccctggcctgaaagacacagtgtcctggcagttgacaggtttttactcattaaccagccttggagcttgtcaaggggaccatgtgttattgtgtgtttggaggaggggggtggggagtagatagcttgaagagtttactgtcccaccccagtaacctaatggggttatcctgattactaactctctagttaaaaagaattggcttgagaatcatcagaatggtggatctgctttgctctttaagcccccacagatcacagcgaaacaccttctttaccacactgtagtggggttgtcttggcttattccaagtcctcacagcttccgaaagactcagctgtttgttagactctccccaaaattgacgttgacaggaactctggtggtgcctgacacgtggctggatgcgtcccactctgtcaggacatcgatctttaggctgagcaagctagcaagctgaatgcttcctgcctgggtatacggcagtgggcaggaacagcctgggtgaacaaccatccaaatggatgagccatcccattcatcccatgaacacccatccaaacggatgagccatcccattgctctcccaaggtggaggcatgcccaccttccctctgtaattccatctccacagcctctctcttggtgggtaaagcaggcaagcatcaggcctacctagtgtggatgggcaccccctgcaactcccgtataggcactgccatgtagagtaaaagcctttgctttgaagggactatagccagcctagggtgtacaatgcaaggctgatggga

SEQ ID NO: 119 - DNA, 514 bp, Homo sapien
tctcaggtgggttatatgcactgccctgggaaattggagaggaagtgtgagaaaaaccatttcccccttccagcttgctgatgttcacttgagaagctgattggaggcgactgatcagtgtgtgtgtgaagggagtgtccctcctttgcggctgcacctgaagcatccactgttgtgtttctttcagccatatcagcagcgacagcttcctgtgtgactgccagctgaagtggctgcccccgtggctaattggcaggatgctgcaggcctttgtgacagccacctgtgcccacccagaatcactgaagggtcagagcattttctctgtgccaccagagagtttcgtgtgcggtaagactgtctttgtaactttttctctccttcatgaaggacaaggaagccaggaggtactcttcattatgggagtaattcctgtgatcagagtaaaccccagcccgtggttacagatcagctgctggatgcaatttatttcttgctgaaaccacacacagta

SEQ ID NO: 120 - DNA, 294 bp, Homo sapien
gccccgactgctcggtgagctgctttctgtcctctccccagggatctggaccataacgagatttcgggcacaatagaggacacgagcggcgccttctcagggctcgacagcctcagcaagctgtgagtatccgccgcacggagctccgccggcaaatgcgcgggacacacttgggtgggagatgtttctgtggcgccccccgcgcctctctgctctgggcccaggcggaagaggagctggcttttgtttggggcagagcttgttttgtttgtggagaagagtttgaagaagagg

SEQ ID NO: 121 - DNA, 5639 bp, Homo sapien
ggcgggactcttgctgcgcggaggagccgtgcggaacccgaggctgcgcgcgcgcgcgcgctctctggccgcggcgtggggacagcgaggcgcactggggcctcccagcgcggggccggccgcgccgtccagcccgaggtctacggctttgcgctccgagcccagaggaagatgcctgccggcaccgagctcgggctgcggggctgaacgcctgtcttccaggcgcagcggcagcactgccctcggccggtgtcggtagcggcactcggcgtgccccgggcggacgaagagcgcaggctgggtacaccttgcccgaatcggcggagttcgcagctagcgagggcgggccggccggcccggatgggcgcggggtttgcggcccccgccgggtgctccggagcggcccgggcaccgggggcacgctgagtgccggagccgcggccgcagagagaacttggggcgggggccatgccccggtgcggagtctagagccgagcggagcgccccgcgggcccgcccgcgtctgcggccgttcgggtcctcacagtccccgcgcccggagttcgcagcgcgctccagacaagatggcgcggccggtccggggagggctcggggccccgcgccgctcgccttgccttctccttctctggctgcttttgcttcggctggagccggtgaccgccgcggccggcccgcgggcgccctgcgcggccgcctgcacttgcgctggggactcgctggactgcggtgggcgcgggctggctgcgttgcccggggacctgccctcctggacgcggagcctgtgagtgccgccctttccgccctctctgcgccccggggctctgtcacttggggatggagcggcgggggttcgtactcagggagggggtgcggactgggttgtgtgtgtggagttgtgcgtgcttgtgcgtgttggaagactgtcaggttggagtggcggaagggagattctgcgtggaggtccgggggagtaggcgtgcgagagagcctggagaagaagagcgtgcctcgtggggtctggagacgagcgagcgtgggtcgtagagatttgggggttagccagcacgcgtcgtgcgggccatctggggaaacctgagttacaacaaactctctgagattgaccctgctggttttgaggacttgccgaacctacaggaagtgtacctcaataataatgagttgacagcggtaccatccctgggcgctgcttcatcacatgtcgtctctctctttctgcagcacaacaagattcgcagcgtggaggggagccagctgaaggcctacctttccttagaagtgttagatctgagtttgaacaacatcacggaagtgcggaacacctgctttccacacggaccgcctataaaggagctcaacctggcaggcaatcggattggcaccctggagttgggagcatttgatggtctgtcacggtcgctgctaactcttcgcctgagcaaaaacaggatcacccagcttcctgtaagagcattcaagctacccaggctgacacaactggacctcaatcggaacaggattcggctgatagagggcctcaccttccaggggctcaacagcttggaggtgctgaagcttcagcgaaacaacatcagcaaactgacagatggggccttctggggactgtccaagatgcatgtgctgcacctggagtacaacagcctggtagaagtgaacagcggctcgctctacggcctcacggccctgcatcagctccacctcagcaacaattccatcgctcgcattcaccgcaagggctggagcttctgccagaagctgcatgagttggtcctgtccttcaacaacctgacacggctggacgaggagagcctggccgagctgagcagcctgagtgtcctgcgtctcagccacaattccatcagccacattgcggagggtgccttcaagggactcaggagcctgcgagtcttggatctggaccataacgagatttcgggcacaatagaggacacgagcggcgccttctcagggctcgacagcctcagcaagctgactctgtttggaaacaagatcaagtctgtggctaagagagcattctcggggctggaaggcctggagcacctgaaccttggagggaatgcgatcagatctgtccagtttgatgcctttgtgaagatgaagaatcttaaagagctccatatcagcagcgacagcttcctgtgtgactgccagctgaagtggctgcccccgtggctaattggcaggatgctgcaggcctttgtgacagccacctgtgcccacccagaatcactgaagggtcagagcattttctctgtgccaccagagagtttcgtgtgcgatgacttcctgaagccacagatcatcacccagccagaaaccaccatggctatggtgggcaaggacatccggtttacatgctcagcagccagcagcagcagctcccccatgacctttgcctggaagaaagacaatgaagtcctgaccaatgcagacatggagaactttgtccacgtccacgcgcaggacggggaagtgatggagtacaccaccatcctgcacctccgtcaggtcactttcgggcacgagggccgctaccaatgtgtcatcaccaaccactttggctccacctattcacataaggccaggctcaccgtgaatgtgttgccatcattcaccaaaacgccccacgacataaccatccggaccaccaccgtggcccgcctcgaatgtgctgccacaggtcacccaaaccctcagattgcctggcagaaggatggaggcacggatttccccgctgcccgtgagcgacgcatgcatgtcatgccggatgacgacgtgtttttcatcactgatgtgaaaatagatgacgcaggggtttacagctgtactgctcagaactcagccggttctatttcagctaatgccaccctgactgtcctagagaccccatccttggtggtccccttggaagaccgtgtggtatctgtgggagaaacagtggccctccaatgcaaagccacggggaaccctccgccccgcatcacctggttcaagggggaccgcccgctgagcctcactgagcggcaccacctgacccctgacaaccagctcctggtggttcagaacgtggtggcagaggatgcgggccgatatacctgtgagatgtccaacaccctgggcacggagcgagctcacagccagctgagcgtcctgcccgcagcaggctgcaggaaggatgggaccacggtaggcatcttcaccattgctgtcgtgagcagcatcgtcctgacgtcactggtctgggtgtgcatcatctaccagaccaggaagaagagtgaagagtacagtgtcaccaacacagatgaaaccgtcgtgccaccagatgttccaagctacctctcttctcaggggaccctttctgaccgacaagaaaccgtggtcaggaccgagggtggccctcaggccaatgggcacattgagagcaatggtgtgtgtccaagagatgcaagccactttccagagcccgacactcacagcgttgcctgcaggcagccaaagctctgtgctgggtctgcgtatcacaaagagccgtggaaagcgatggagaaagctgaagggacacctgggccacataagatggaacacggtggccgggtcgtatgcagtgactgcaacaccgaagtggactgttactccaggggacaagccttccacccccagcctgtgtccagagacagcgcacagccaagtgcgccaaatggcccggagccgggtgggagtgaccaagagcattctccacatcaccagtgcagcaggactgccgctgggtcctgccccgagtgccaagggtcgctctaccccagtaaccacgatagaatgctgacggctgtgaagaaaaagccaatggcatctctagatgggaaaggggattcttcctggactttagcaaggttgtatcacccggactccacagagctacagcctgcatcttcattaacttcaggcagtccagagcgcgcggaagcccagtacttgcttgtttccaatggccacctccccaaagcatgtgacgccagtcccgagtccacgccactgacaggacagctccccgggaaacagagggtgccactgctgttggcaccaaaaagctaggttttgtctacctcagttcttgtcataccaatctctacgggaaagagaggtaggagaggctgcgaggaagcttgggttcaagcgtcactcatctgtacatagttgtaactcccatgtggagtatcagtcgctcacaggacttggatctgaagcacagtaaacgcaagaggggatttgtgtacaaaaggcaaaaaaagtatttgatatcattgtacataagagttttcagagatttcatatatatcttttacagaggctattttaatctttagtgcatggttaacagaaaaaaattatacaattttgacaatattatttttcgtatcaggttgctgtttaattttggagggggtggggaaatagttctggtgccttaacgcatggctggaatttatagaggctacaaccacatttgttcacaggagtttttggtgcggggtgggaaggatggaaggccttggatttatattgcacttcatagacccctaggctgctgtgcggtgggactccacatgcgccggaaggagcttcaggtgagcactgctcatgtgtggatgcccctgcaacaggcttccctgtctgtagagccaggggtgcaagtgccatccacacttgcagtgaatggcttttccttttaggtttaagtcctgtctgtctgtaaggcgtagaatctgtccgtctgtaaggcgtagaatgagggttgttaatccatcacaagcaaaaggtcagaacagttaaacactgcctttcctcctcctcttattttatgataaaagcaaatgtggccttctcagtatcattcgattgctatttgagacttttaaattaaggtaaaggctgctggtgttggtacctgtggatttttctatactgatgttttcgttttgccaatataatgagtattacattggccttgggggacagaaaggaggaagttctgacttttcagggctaccttatttctactaaggacccagagcaggcctgtccatgccattccttcgcacagatgaaactgagctgggactggaaaggacagcccttgacctgggttctgggtataatttgcacttttgagactggtagctaaccatcttatgagtgccaatgtgtcatttagtaaaacttaaatagaaacaaggtccttcaaatgttcctttggccaaaagctgaagggagttactgagaaaatagttaacaattactgtcaggtgtcatcactgttcaaaaggtaagcacatttagaattttgttcttgacagttaactgactaatcttacttccacaaaatatgtgaatttgctgcttctgagaggcaatgtgaaagagggagtattacttttatgtacaaagttatttatttatagaaattttggtacagtgtacattgaaaaccatgtaaaatattgaagtgtctaacaaatggcattgaagtgtctttaataaaggttcatttataaatgtca

SEQ ID NO: 122 - DNA, 5188 bp, Homo sapien
ggcgggactcttgctgcgcggaggagccgtgcggaacccgaggctgcgcgcgcgcgcgcgctctctggccgcggcgtggggacagcgaggcgcactggggcctcccagcgcggggccggccgcgccgtccagcccgaggtctacggctttgcgctccgagcccagaggaagatgcctgccggcaccgagctcgggctgcggggctgaacgcctgtcttccaggcgcagcggcagcactgccctcggccggtgtcggtagcggcactcggcgtgccccgggcggacgaagagcgcaggctgggtacaccttgcccgaatcggcggagttcgcagctagcgagggcgggccggccggcccggatgggcgcggggtttgcggcccccgccgggtgctccggagcggcccgggcaccgggggcacgctgagtgccggagccgcggccgcagagagaacttggggcgggggccatgccccggtgcggagtctagagccgagcggagcgccccgcgggcccgcccgcgtctgcggccgttcgggtcctcacagtccccgcgcccggagttcgcagcgcgctccagacaagatggcgcggccggtccggggagggctcggggccccgcgccgctcgccttgccttctccttctctggctgcttttgcttcggctggagccggtgaccgccgcggccggcccgcgggcgccctgcgcggccgcctgcacttgcgctggggactcgctggactgcggtgggcgcgggctggctgcgttgcccggggacctgccctcctggacgcggagcctaaacctgagttacaacaaactctctgagattgaccctgctggttttgaggacttgccgaacctacaggaagtgcagcacaacaagattcgcagcgtggaggggagccagctgaaggcctacctttccttagaagtgttagatctgagtttgaacaacatcacggaagtgcggaacacctgctttccacacggaccgcctataaaggagctcaacctggcaggcaatcggattggcaccctggagttgggagcatttgatggtctgtcacggtcgctgctaactcttcgcctgagcaaaaacaggattcggctgatagagggcctcaccttccaggggctcaacagcttggaggtgctgaagcttcagcgaaacaacatcagcaaactgacagatggggccttctggggactgtccaagatgcatgtgctgcacctggagtacaacagcctggtagaagtgaacagcggctcgctctacggcctcacggccctgcatcagctccacctcagcaacaattccatcgctcgcattcaccgcaagggctggagcttctgccagaagctgcatgagttggtcctgtccttcaacaacctgacacggctggacgaggagagcctggccgagctgagcagcctgagtgtcctgcgtctcagccacaattccatcagccacattgcggagggtgccttcaagggactcaggagcctgcgagtcttggatctggaccataacgagatttcgggcacaatagaggacacgagcggcgccttctcagggctcgacagcctcagcaagctgactctgtttggaaacaagatcaagtctgtggctaagagagcattctcggggctggaaggcctggagcacctgaaccttggagggaatgcgatcagatctgtccagtttgatgcctttgtgaagatgaagaatcttaaagagctccatatcagcagcgacagcttcctgtgtgactgccagctgaagtggctgcccccgtggctaattggcaggatgctgcaggcctttgtgacagccacctgtgcccacccagaatcactgaagggtcagagcattttctctgtgccaccagagagtttcgtgtgcgatgacttcctgaagccacagatcatcacccagccagaaaccaccatggctatggtgggcaaggacatccggtttacatgctcagcagccagcagcagcagctcccccatgacctttgcctggaagaaagacaatgaagtcctgaccaatgcagacatggagaactttgtccacgtccacgcgcaggacggggaagtgatggagtacaccaccatcctgcacctccgtcaggtcactttcgggcacgagggccgctaccaatgtgtcatcaccaaccactttggctccacctattcacataaggccaggctcaccgtgaatgtgttgccatcattcaccaaaacgccccacgacataaccatccggaccaccaccgtggcccgcctcgaatgtgctgccacaggtcacccaaaccctcagattgcctggcagaaggatggaggcacggatttccccgctgcccgtgagcgacgcatgcatgtcatgccggatgacgacgtgtttttcatcactgatgtgaaaatagatgacgcaggggtttacagctgtactgctcagaactcagccggttctatttcagctaatgccaccctgactgtcctagagaccccatccttggtggtccccttggaagaccgtgtggtatctgtgggagaaacagtggccctccaatgcaaagccacggggaaccctccgccccgcatcacctggttcaagggggaccgcccgctgagcctcactgagcggcaccacctgacccctgacaaccagctcctggtggttcagaacgtggtggcagaggatgcgggccgatatacctgtgagatgtccaacaccctgggcacggagcgagctcacagccagctgagcgtcctgcccgcagcaggctgcaggaaggatgggaccacggtaggcatcttcaccattgctgtcgtgagcagcatcgtcctgacgtcactggtctgggtgtgcatcatctaccagaccaggaagaagagtgaagagtacagtgtcaccaacacagatgaaaccgtcgtgccaccagatgttccaagctacctctcttctcaggggaccctttctgaccgacaagaaaccgtggtcaggaccgagggtggccctcaggccaatgggcacattgagagcaatggtgtgtgtccaagagatgcaagccactttccagagcccgacactcacagcgttgcctgcaggcagccaaagctctgtgctgggtctgcgtatcacaaagagccgtggaaagcgatggagaaagctgaagggacacctgggccacataagatggaacacggtggccgggtcgtatgcagtgactgcaacaccgaagtggactgttactccaggggacaagccttccacccccagcctgtgtccagagacagcgcacagccaagtgcgccaaatggcccggagccgggtgggagtgaccaagagcattctccacatcaccagtgcagcaggactgccgctgggtcctgccccgagtgccaagggtcgctctaccccagtaaccacgatagaatgctgacggctgtgaagaaaaagccaatggcatctctagatgggaaaggggattcttcctggactttagcaaggttgtatcacccggactccacagagctacagcctgcatcttcattaacttcaggcagtccagagcgcgcggaagcccagtacttgcttgtttccaatggccacctccccaaagcatgtgacgccagtcccgagtccacgccactgacaggacagctccccgggaaacagagggtgccactgctgttggcaccaaaaagctaggttttgtctacctcagttcttgtcataccaatctctacgggaaagagaggtaggagaggctgcgaggaagcttgggttcaagcgtcactcatctgtacatagttgtaactcccatgtggagtatcagtcgctcacaggacttggatctgaagcacagtaaacgcaagaggggatttgtgtacaaaaggcaaaaaaagtatttgatatcattgtacataagagttttcagagatttcatatatatcttttacagaggctattttaatctttagtgcatggttaacagaaaaaaattatacaattttgacaatattatttttcgtatcaggttgctgtttaattttggagggggtggggaaatagttctggtgccttaacgcatggctggaatttatagaggctacaaccacatttgttcacaggagtttttggtgcggggtgggaaggatggaaggccttggatttatattgcacttcatagacccctaggctgctgtgcggtgggactccacatgcgccggaaggagcttcaggtgagcactgctcatgtgtggatgcccctgcaacaggcttccctgtctgtagagccaggggtgcaagtgccatccacacttgcagtgaatggcttttccttttaggtttaagtcctgtctgtctgtaaggcgtagaatctgtccgtctgtaaggcgtagaatgagggttgttaatccatcacaagcaaaaggtcagaacagttaaacactgcctttcctcctcctcttattttatgataaaagcaaatgtggccttctcagtatcattcgattgctatttgagacttttaaattaaggtaaaggctgctggtgttggtacctgtggatttttctatactgatgttttcgttttgccaatataatgagtattacattggccttgggggacagaaaggaggaagttctgacttttcagggctaccttatttctactaaggacccagagcaggcctgtccatgccattccttcgcacagatgaaactgagctgggactggaaaggacagcccttgacctgggttctgggtataatttgcacttttgagactggtagctaaccatcttatgagtgccaatgtgtcatttagtaaaacttaaatagaaacaaggtccttcaaatgttcctttggccaaaagctgaagggagttactgagaaaatagttaacaattactgtcaggtgtcatcactgttcaaaaggtaagcacatttagaattttgttcttgacagttaactgactaatcttacttccacaaaatatgtgaatttgctgcttctgagaggcaatgtgaaagagggagtattacttttatgtacaaagttatttatttatagaaattttggtacagtgtacattgaaaaccatgtaaaatattgaagtgtctaacaaatggcattgaagtgtctttaataaaggttcatttataaatgtca

SEQ ID NO: 123 - DNA, 5922 bp, Homo sapien
ggcgggactcttgctgcgcggaggagccgtgcggaacccgaggctgcgcgcgcgcgcgcgctctctggccgcggcgtggggacagcgaggcgcactggggcctcccagcgcggggccggccgcgccgtccagcccgaggtctacggctttgcgctccgagcccagaggaagatgcctgccggcaccgagctcgggctgcggggctgaacgcctgtcttccaggcgcagcggcagcactgccctcggccggtgtcggtagcggcactcggcgtgccccgggcggacgaagagcgcaggctgggtacaccttgcccgaatcggcggagttcgcagctagcgagggcgggccggccggcccggatgggcgcggggtttgcggcccccgccgggtgctccggagcggcccgggcaccgggggcacgctgagtgccggagccgcggccgcagagagaacttggggcgggggccatgccccggtgcggagtctagagccgagcggagcgccccgcgggcccgcccgcgtctgcggccgttcgggtcctcacagtccccgcgcccggagttcgcagcgcgctccagacaagatggcgcggccggtccggggagggctcggggccccgcgccgctcgccttgccttctccttctctggctgcttttgcttcggctggagccggtgaccgccgcggccggcccgcgggcgccctgcgcggccgcctgcacttgcgctggggactcgctggactgcggtgggcgcgggctggctgcgttgcccggggacctgccctcctggacgcggagcctaaacctgagttacaacaaactctctgagattgaccctgctggttttgaggacttgccgaacctacaggaagtgtacctcaataataatgagttgacagcggtaccatccctgggcgctgcttcatcacatgtcgtctctctctttctgcagcacaacaagattcgcagcgtggaggggagccagctgaaggcctacctttccttagaagtgttagatctgagtttgaacaacatcacggaagtgcggaacacctgctttccacacggaccgcctataaaggagctcaacctggcaggcaatcggattggcaccctggagttgggagcatttgatggtctgtcacggtcgctgctaactcttcgcctgagcaaaaacaggatcacccagcttcctgtaagagcattcaagctacccaggctgacacaactggacctcaatcggaacaggattcggctgatagagggcctcaccttccaggggctcaacagcttggaggtgctgaagcttcagcgaaacaacatcagcaaactgacagatggggccttctggggactgtccaagatgcatgtgctgcacctggagtacaacagcctggtagaagtgaacagcggctcgctctacggcctcacggccctgcatcagctccacctcagcaacaattccatcgctcgcattcaccgcaagggctggagcttctgccagaagctgcatgagttggtcctgtccttcaacaacctgacacggctggacgaggagagcctggccgagctgagcagcctgagtgtcctgcgtctcagccacaattccatcagccacattgcggagggtgccttcaagggactcaggagcctgcgagtcttggatctggaccataacgagatttcgggcacaatagaggacacgagcggcgccttctcagggctcgacagcctcagcaagctgactctgtttggaaacaagatcaagtctgtggctaagagagcattctcggggctggaaggcctggagcacctgaaccttggagggaatgcgatcagatctgtccagtttgatgcctttgtgaagatgaagaatcttaaagagctccatatcagcagcgacagcttcctgtgtgactgccagctgaagtggctgcccccgtggctaattggcaggatgctgcaggcctttgtgacagccacctgtgcccacccagaatcactgaagggtcagagcattttctctgtgccaccagagagtttcgtgtgcgatgacttcctgaagccacagatcatcacccagccagaaaccaccatggctatggtgggcaaggacatccggtttacatgctcagcagccagcagcagcagctcccccatgacctttgcctggaagaaagacaatgaagtcctgaccaatgcagacatggagaactttgtccacgtccacgcgcaggacggggaagtgatggagtacaccaccatcctgcacctccgtcaggtcactttcgggcacgagggccgctaccaatgtgtcatcaccaaccactttggctccacctattcacataaggccaggctcaccgtgaatgtgttgccatcattcaccaaaacgccccacgacataaccatccggaccaccaccgtggcccgcctcgaatgtgctgccacaggtcacccaaaccctcagattgcctggcagaaggatggaggcacggatttccccgctgcccgtgagcgacgcatgcatgtcatgccggatgacgacgtgtttttcatcactgatgtgaaaatagatgacgcaggggtttacagctgtactgctcagaactcagccggttctatttcagctaatgccaccctgactgtcctagagaccccatccttggtggtccccttggaagaccgtgtggtatctgtgggagaaacagtggccctccaatgcaaagccacggggaaccctccgccccgcatcacctggttcaagggggaccgcccgctgagcctcactgagcggcaccacctgacccctgacaaccagctcctggtggttcagaacgtggtggcagaggatgcgggccgatatacctgtgagatgtccaacaccctgggcacggagcgagctcacagccagctgagcgtcctgcccgcagcaggctgcaggaaggatgggaccacggtaggcatcttcaccattgctgtcgtgagcagcatcgtcctgacgtcactggtctgggtgtgcatcatctaccagaccaggaagaagagtgaagagtacagtgtcaccaacacagacaggtcaggccctgccagcggagctgactttcaaggagggaggaatggcagtgatgctggggaactgggccgggttccagtggcttttgaaagaatcgcactgtgttcagaactcctgagggtttagtcccactaattccattttaactttgaggaacttaaccttaaacaggaatactctcaaatttaaccttaaacaggaatactcacaaatacaagtaactgacgcaccttgcagttttccctctccttgctaactcagaggccgcctatgcacaggccctgctgccacgtagtaggttgttcctgaaacagcgcggtacttctgtgagccccggctttccatcactggtctccacttcttgtggcgtctggcatctgctggctgcgctcttcacactgggtgtagagtaaagctgagcaggctctgggagggcctgttgcgtacatggactccatgtcatctctctgcacagcgctgatggtcgtcactgggaggatcccctttctgagcttgacagtgaacgtgtgtctgcatttcttgtcactgagaccctggtgttctatttgttctgtctccttgcagatgatgaaaccgtcgtgccaccagatgttccaagctacctctcttctcaggggaccctttctgaccgacaagaaaccgtggtcaggaccgagggtggccctcaggccaatgggcacattgagagcaatggtgtgtgtccaagagatgcaagccactttccagagcccgacactcacagcgttgcctgcaggcagccaaagctctgtgctgggtctgcgtatcacaaagagccgtggaaagcgatggagaaagctgaagggacacctgggccacataagatggaacacggtggccgggtcgtatgcagtgactgcaacaccgaagtggactgttactccaggggacaagccttccacccccagcctgtgtccagagacagcgcacagccaagtgcgccaaatggcccggagccgggtgggagtgaccaagagcattctccacatcaccagtgcagcaggactgccgctgggtcctgccccgagtgccaagggtcgctctaccccagtaaccacgatagaatgctgacggctgtgaagaaaaagccaatggcatctctagatgggaaaggggattcttcctggactttagcaaggttgtatcacccggactccacagagctacagcctgcatcttcattaacttcaggcagtccagagcgcgcggaagcccagtacttgcttgtttccaatggccacctccccaaagcatgtgacgccagtcccgagtccacgccactgacaggacagctccccgggaaacagagggtgccactgctgttggcaccaaaaagctaggttttgtctacctcagttcttgtcataccaatctctacgggaaagagaggtaggagaggctgcgaggaagcttgggttcaagcgtcactcatctgtacatagttgtaactcccatgtggagtatcagtcgctcacaggacttggatctgaagcacagtaaacgcaagaggggatttgtgtacaaaaggcaaaaaaagtatttgatatcattgtacataagagttttcagagatttcatatatatcttttacagaggctattttaatctttagtgcatggttaacagaaaaaaattatacaattttgacaatattatttttcgtatcaggttgctgtttaattttggagggggtggggaaatagttctggtgccttaacgcatggctggaatttatagaggctacaaccacatttgttcacaggagtttttggtgcggggtgggaaggatggaaggccttggatttatattgcacttcatagacccctaggctgctgtgcggtgggactccacatgcgccggaaggagcttcaggtgagcactgctcatgtgtggatgcccctgcaacaggcttccctgtctgtagagccaggggtgcaagtgccatccacacttgcagtgaatggcttttccttttaggtttaagtcctgtctgtctgtaaggcgtagaatctgtccgtctgtaaggcgtagaatgagggttgttaatccatcacaagcaaaaggtcagaacagttaaacactgcctttcctcctcctcttattttatgataaaagcaaatgtggccttctcagtatcattcgattgctatttgagacttttaaattaaggtaaaggctgctggtgttggtacctgtggatttttctatactgatgttttcgttttgccaatataatgagtattacattggccttgggggacagaaaggaggaagttctgacttttcagggctaccttatttctactaaggacccagagcaggcctgtccatgccattccttcgcacagatgaaactgagctgggactggaaaggacagcccttgacctgggttctgggtataatttgcacttttgagactggtagctaaccatcttatgagtgccaatgtgtcatttagtaaaacttaaatagaaacaaggtccttcaaatgttcctttggccaaaagctgaagggagttactgagaaaatagttaacaattactgtcaggtgtcatcactgttcaaaaggtaagcacatttagaattttgttcttgacagttaactgactaatcttacttccacaaaatatgtgaatttgctgcttctgagaggcaatgtgaaagagggagtattacttttatgtacaaagttatttatttatagaaattttggtacagtgtacattgaaaaccatgtaaaatattgaagtgtctaacaaatggcattgaagtgtctttaataaaggttcatttataaatgtca

SEQ ID NO: 124 - DNA, 5921 bp, Homo sapien
ggcgggactcttgctgcgcggaggagccgtgcggaacccgaggctgcgcgcgcgcgcgcgctctctggccgcggcgtggggacagcgaggcgcactggggcctcccagcgcggggccggccgcgccgtccagcccgaggtctacggctttgcgctccgagcccagaggaagatgcctgccggcaccgagctcgggctgcggggctgaacgcctgtcttccaggcgcagcggcagcactgccctcggccggtgtcggtagcggcactcggcgtgccccgggcggacgaagagcgcaggctgggtacaccttgcccgaatcggcggagttcgcagctagcgagggcgggccggccggcccggatgggcgcggggtttgcggcccccgccgggtgctccggagcggcccgggcaccgggggcacgctgagtgccggagccgcggccgcagagagaacttggggcgggggccatgccccggtgcggagtctagagccgagcggagcgccccgcgggcccgcccgcgtctgcggccgttcgggtcctcacagtccccgcgcccggagttcgcagcgcgctccagacaagatggcgcggccggtccggggagggctcggggccccgcgccgctcgccttgccttctccttctctggctgcttttgcttcggctggagccggtgaccgccgcggccggcccgcgggcgccctgcgcggccgcctgcacttgcgctggggactcgctggactgcggtgggcgcgggctggctgcgttgcccggggacctgccctcctggacgcggagcctaaacctgagttacaacaaactctctgagattgaccctgctggttttgaggacttgccgaacctacaggaagtgtacctcaataataatgagttgacagcggtaccatccctgggcgctgcttcatcacatgtcgtctctctctttctgcagcacaacaagattcgcagcgtggaggggagccagctgaaggcctacctttccttagaagtgttagatctgagtttgaacaacatcacggaagtgcggaacacctgctttccacacggaccgcctataaaggagctcaacctggcaggcaatcggattggcaccctggagttgggagcatttgatggtctgtcacggtcgctgctaactcttcgcctgagcaaaaacaggatcacccagcttcctgtaagagcattcaagctacccaggctgacacaactggacctcaatcggaacaggattcggctgatagagggcctcaccttccaggggctcaacagcttggaggtgctgaagcttcagcgaaacaacatcagcaaactgacagatggggccttctggggactgtccaagatgcatgtgctgcacctggagtacaacagcctggtagaagtgaacagcggctcgctctacggcctcacggccctgcatcagctccacctcagcaacaattccatcgctcgcattcaccgcaagggctggagcttctgccagaagctgcatgagttggtcctgtccttcaacaacctgacacggctggacgaggagagcctggccgagctgagcagcctgagtgtcctgcgtctcagccacaattccatcagccacattgcggagggtgccttcaagggactcaggagcctgcgagtcttggatctggaccataacgagatttcgggcacaatagaggacacgagcggcgccttctcagggctcgacagcctcagcaagctgactctgtttggaaacaagatcaagtctgtggctaagagagcattctcggggctggaaggcctggagcacctgaaccttggagggaatgcgatcagatctgtccagtttgatgcctttgtgaagatgaagaatcttaaagagctccatatcagcagcgacagcttcctgtgtgactgccagctgaagtggctgcccccgtggctaattggcaggatgctgcaggcctttgtgacagccacctgtgcccacccagaatcactgaagggtcagagcattttctctgtgccaccagagagtttcgtgtgcgatgacttcctgaagccacagatcatcacccagccagaaaccaccatggctatggtgggcaaggacatccggtttacatgctcagcagccagcagcagcagctcccccatgacctttgcctggaagaaagacaatgaagtcctgaccaatgcagacatggagaactttgtccacgtccacgcgcaggacggggaagtgatggagtacaccaccatcctgcacctccgtcaggtcactttcgggcacgagggccgctaccaatgtgtcatcaccaaccactttggctccacctattcacataaggccaggctcaccgtgaatgtgttgccatcattcaccaaaacgccccacgacataaccatccggaccaccaccgtggcccgcctcgaatgtgctgccacaggtcacccaaaccctcagattgcctggcagaaggatggaggcacggatttccccgctgcccgtgagcgacgcatgcatgtcatgccggatgacgacgtgtttttcatcactgatgtgaaaatagatgacgcaggggtttacagctgtactgctcagaactcagccggttctatttcagctaatgccaccctgactgtcctaggtttgcctattgctctactgtgtgtgtgtgtgtgtgtgtgtgagcgagagagagagactctcaaatgctctgtgtggccaggggtggtatgcgttgtgggcctttcgaccctgtttgaaatttggggctgctttttgagttgagttaatttttcttaaacaagtgtttctatctctttaaaagaaatgatagctggtgaattaagagtcttcatagggtttagctacagaacattttaagaattggacaggatggatgtgggcttggtcaagagctacagaacattttaagaattggacaggatggatgtgggcttggtcaagaataaggacacaggcctgacacaggacagttagggaatagcaggggcttttgtcagcagaggttcactgtccctgtggaagccactcccagcatggagatgactcagtcaatgagttgaagggtcttctccaaagcttgccactctgagacagactctcagatgcatctcattgatatgttggattgtccgttgtccagaagaccgggcagagccagagcaacggaggccctgagaatgactaagatctctgttgctctcttgtagagaccccatccttggtggtccccttggaagaccgtgtggtatctgtgggagaaacagtggccctccaatgcaaagccacggggaaccctccgccccgcatcacctggttcaagggggaccgcccgctgagcctcactgagcggcaccacctgacccctgacaaccagctcctggtggttcagaacgtggtggcagaggatgcgggccgatatacctgtgagatgtccaacaccctgggcacggagcgagctcacagccagctgagcgtcctgcccgcagcaggctgcaggaaggatgggaccacggtaggcatcttcaccattgctgtcgtgagcagcatcgtcctgacgtcactggtctgggtgtgcatcatctaccagaccaggaagaagagtgaagagtacagtgtcaccaacacagatgaaaccgtcgtgccaccagatgttccaagctacctctcttctcaggggaccctttctgaccgacaagaaaccgtggtcaggaccgagggtggccctcaggccaatgggcacattgagagcaatggtgtgtgtccaagagatgcaagccactttccagagcccgacactcacagcgttgcctgcaggcagccaaagctctgtgctgggtctgcgtatcacaaagagccgtggaaagcgatggagaaagctgaagggacacctgggccacataagatggaacacggtggccgggtcgtatgcagtgactgcaacaccgaagtggactgttactccaggggacaagccttccacccccagcctgtgtccagagacagcgcacagccaagtgcgccaaatggcccggagccgggtgggagtgaccaagagcattctccacatcaccagtgcagcaggactgccgctgggtcctgccccgagtgccaagggtcgctctaccccagtaaccacgatagaatgctgacggctgtgaagaaaaagccaatggcatctctagatgggaaaggggattcttcctggactttagcaaggttgtatcacccggactccacagagctacagcctgcatcttcattaacttcaggcagtccagagcgcgcggaagcccagtacttgcttgtttccaatggccacctccccaaagcatgtgacgccagtcccgagtccacgccactgacaggacagctccccgggaaacagagggtgccactgctgttggcaccaaaaagctaggttttgtctacctcagttcttgtcataccaatctctacgggaaagagaggtaggagaggctgcgaggaagcttgggttcaagcgtcactcatctgtacatagttgtaactcccatgtggagtatcagtcgctcacaggacttggatctgaagcacagtaaacgcaagaggggatttgtgtacaaaaggcaaaaaaagtatttgatatcattgtacataagagttttcagagatttcatatatatcttttacagaggctattttaatctttagtgcatggttaacagaaaaaaattatacaattttgacaatattatttttcgtatcaggttgctgtttaattttggagggggtggggaaatagttctggtgccttaacgcatggctggaatttatagaggctacaaccacatttgttcacaggagtttttggtgcggggtgggaaggatggaaggccttggatttatattgcacttcatagacccctaggctgctgtgcggtgggactccacatgcgccggaaggagcttcaggtgagcactgctcatgtgtggatgcccctgcaacaggcttccctgtctgtagagccaggggtgcaagtgccatccacacttgcagtgaatggcttttccttttaggtttaagtcctgtctgtctgtaaggcgtagaatctgtccgtctgtaaggcgtagaatgagggttgttaatccatcacaagcaaaaggtcagaacagttaaacactgcctttcctcctcctcttattttatgataaaagcaaatgtggccttctcagtatcattcgattgctatttgagacttttaaattaaggtaaaggctgctggtgttggtacctgtggatttttctatactgatgttttcgttttgccaatataatgagtattacattggccttgggggacagaaaggaggaagttctgacttttcagggctaccttatttctactaaggacccagagcaggcctgtccatgccattccttcgcacagatgaaactgagctgggactggaaaggacagcccttgacctgggttctgggtataatttgcacttttgagactggtagctaaccatcttatgagtgccaatgtgtcatttagtaaaacttaaatagaaacaaggtccttcaaatgttcctttggccaaaagctgaagggagttactgagaaaatagttaacaattactgtcaggtgtcatcactgttcaaaaggtaagcacatttagaattttgttcttgacagttaactgactaatcttacttccacaaaatatgtgaatttgctgcttctgagaggcaatgtgaaagagggagtattacttttatgtacaaagttatttatttatagaaattttggtacagtgtacattgaaaaccatgtaaaatattgaagtgtctaacaaatggcattgaagtgtctttaataaaggttcatttataaatgtca

SEQ ID NO: 125 - DNA, 5684 bp, Homo sapien
ggcgggactcttgctgcgcggaggagccgtgcggaacccgaggctgcgcgcgcgcgcgcgctctctggccgcggcgtggggacagcgaggcgcactggggcctcccagcgcggggccggccgcgccgtccagcccgaggtctacggctttgcgctccgagcccagaggaagatgcctgccggcaccgagctcgggctgcggggctgaacgcctgtcttccaggcgcagcggcagcactgccctcggccggtgtcggtagcggcactcggcgtgccccgggcggacgaagagcgcaggctgggtacaccttgcccgaatcggcggagttcgcagctagcgagggcgggccggccggcccggatgggcgcggggtttgcggcccccgccgggtgctccggagcggcccgggcaccgggggcacgctgagtgccggagccgcggccgcagagagaacttggggcgggggccatgccccggtgcggagtctagagccgagcggagcgccccgcgggcccgcccgcgtctgcggccgttcgggtcctcacagtccccgcgcccggagttcgcagcgcgctccagacaagatggcgcggccggtccggggagggctcggggccccgcgccgctcgccttgccttctccttctctggctgcttttgcttcggctggagccggtgaccgccgcggccggcccgcgggcgccctgcgcggccgcctgcacttgcgctggggactcgctggactgcggtgggcgcgggctggctgcgttgcccggggacctgccctcctggacgcggagcctaaacctgagttacaacaaactctctgagattgaccctgctggttttgaggacttgccgaacctacaggaagtgtacctcaataataatgagttgacagcggtaccatccctgggcgctgcttcatcacatgtcgtctctctctttctgcagcacaacaagattcgcagcgtggaggggagccagctgaaggcctacctttccttagaagtgttagatctgagtttgaacaacatcacggaagtgcggaacacctgctttccacacggaccgcctataaaggagctcaacctggcaggcaatcggattggcaccctggagttgggagcatttgatggtctgtcacggtcgctgctaactcttcgcctgagcaaaaacaggatcacccagcttcctgtaagagcattcaagctacccaggctgacacaactggacctcaatcggaacaggattcggctgatagagggcctcaccttccaggggctcaacagcttggaggtgctgaagcttcagcgaaacaacatcagcaaactgacagatggggccttctggggactgtccaagatgcatgtgctgcacctggagtacaacagcctggtagaagtgaacagcggctcgctctacggcctcacggccctgcatcagctccacctcagcaacaattccatcgctcgcattcaccgcaagggctggagcttctgccagaagctgcatgagttggtcctgtccttcaacaacctgacacggctggacgaggagagcctggccgagctgagcagcctgagtgtcctgcgtctcagccacaattccatcagccacattgcggagggtgccttcaagggactcaggagcctgcgagtcttggatctggaccataacgagatttcgggcacaatagaggacacgagcggcgccttctcagggctcgacagcctcagcaagctgactctgtttggaaacaagatcaagtctgtggctaagagagcattctcggggctggaaggcctggagcacctgaaccttggagggaatgcgatcagatctgtccagtttgatgcctttgtgaagatgaagaatcttaaagagctccatatcagcagcgacagcttcctgtgtgactgccagctgaagtggctgcccccgtggctaattggcaggatgctgcaggcctttgtgacagccacctgtgcccacccagaatcactgaagggtcagagcattttctctgtgccaccagagagtttcgtgtgcgatgacttcctgaagccacagatcatcacccagccagaaaccaccatggctatggtgggcaaggacatccggtttacatgctcagcagccagcagcagcagctcccccatgacctttgcctggaagaaagacaatgaagtcctgaccaatgcagacatggagaactttgtccacgtccacgcgcaggacggggaagtgatggagtacaccaccatcctgcacctccgtcaggtcactttcgggcacgagggccgctaccaatgtgtcatcaccaaccactttggctccacctattcacataaggccaggctcaccgtgaatgtgttgccatcattcaccaaaacgccccacgacataaccatccggaccaccaccgtggcccgcctcgaatgtgctgccacaggtcacccaaaccctcagattgcctggcagaaggatggaggcacggatttccccgctgcccgtgagcgacgcatgcatgtcatgccggatgacgacgtgtttttcatcactgatgtgaaaatagatgacgcaggggtttacagctgtactgctcagaactcagccggttctatttcagctaatgccaccctgactgtcctagagaccccatccttggtggtccccttggaagaccgtgtggtatctgtgggagaaacagtggccctccaatgcaaagccacggggaaccctccgccccgcatcacctggttcaagggggaccgcccgctgagcctcactgagcggcaccacctgacccctgacaaccagctcctggtggttcagaacgtggtggcagaggatgcgggccgatatacctgtgagatgtccaacaccctgggcacggagcgagctcacagccagctgagcgtcctgcccgcagcaggctgcaggaaggatgggaccacggtaggcatcttcaccattgctgtcgtgagcagcatcgtcctgacgtcactggtctgggtgtgcatcatctaccagaccaggaagaagagtgaagagtacagtgtcaccaacacagatgaaaccgtcgtgccaccagatgttccaagctacctctcttctcaggggaccctttctgaccgacaagaaaccgtggtcaggaccgagggtggccctcaggccaatgggcacattgagagcaatggtgtgtgtccaagagatgcaagccactttccagagcccgacactcacagcgttgcctgcaggcagccaaagctctgtgctgggtctgcgtatcacaaagagccgtggaaagcgatggagaaagctgaagggacacctgggccacataagatggaacacggtggccgggtcgtatgcagtgactgcaacaccgaagtggactgttactccaggggacaagccttccacccccagcctgtgtccagagacagcgcacagccaagtgcgccaaatggcccggagccgggtgggagtgaccaagagcattctccacatcaccagtgcagcaggactgccgctgggtcctgccccgagtgccaagggtcgctctaccccagtaaccacgatagaatgctgacggctgtgaagaaaaagccaatggcatctctagatgggaaaggggattcttcctggactttagcaaggttgtatcacccggactccacagagctacagcctgcatcttcattaacttcaggcagtccagagcgcgcggaagcccagtacttgcttgtttccaatggccacctccccaaagcatgtgacgccagtcccgagtccacgccactgacaggacagctccccgggaaacagagggtgccactgctgttggcaccaaaaagctaggttttgtctacctcagttcttgtcataccaatctctacgggaaagagaggtaggagaggctgcgaggaagcttgggttcaagcgtcactcatctgtacatagttgtaactcccatgtggagtatcagtcgctcacaggacttggatctgaagcacagtaaacgcaagaggggatttgtgtacaaaaggcaaaaaaagtatttgatatcattgtacataagagttttcagagatttcatatatatcttttacagaggctattttaatctttagtgcatggttaacagaaaaaaattatacaattttgacaatattatttttcgtatcaggttgctgtttaattttggagggggtggggaaatagttctggtgccttaacgcatggctggaatttatagaggctacaaccacatttgttcacaggagtttttggtgcggggtgggaaggatggaaggccttggatttatattgcacttcatagacccctaggctgctgtgcggtgggactccacatgcgccggaaggagcttcaggtgagcactgctcatgtgtggatgcccctgcaacaggcttccctgtctgtagagccaggggtgcaagtgccatccacacttgcagtgaatggcttttccttttaggtttaagtcctgtctgtctgtaaggcgtagaatctgtccgtctgtaaggcgtagaatgagggttgttaatccatcacaagcaaaaggtcagaacagttaaacactgcctttcctcctcctcttattttatgataaaagcaaatgtggccttctcagtatcattcgattgctatttgagacttttaaattaaggtaaaggctgctggtgttggtacctgtggatttttctatactgatgttttcgttttgccaatataatgagtattacattggccttgggggacagaaaggaggaagttctgacttttcagggctaccttatttctactaaggacccagagcaggcctgtccatgccattccttcgcacagatgaaactgagctgggactggaaaggacagcccttgacctgggttctgggtataatttgcacttttgagactggtagctaaccatcttatgagtgccaatgtgtcatttagtaaaacttaaatagaaacaaggtccttcaaatgttcctttggccaaaagctgaagggagttactgagaaaatagttaacaattactgtcaggtgtcatcactgttcaaaaggtaagcacatttagaattttgttcttgacagttaactgactaatcttacttccacaaaatatgtgaatttgctgcttctgagaggcaatgtgaaagagggagtattacttttatgtacaaagttatttatttatagaaattttggtacagtgtacattgaaaaccatgtaaaatattgaagtgtctaacaaatggcattgaagtgtctttaataaaggttcatttataaatgtcaaaaaaaaaaaaaaaaaaaaaaagataaaaaaaaagaaaaaaaaaaaaaagaagagggaaaggggcacaaatcagaaagcaataaacgaacaaacaaactaaaatgacgagtacggcgccaggcaagacgaaggaaaagaggaaacaaaacacaagataatgggtggcgcggacgcgccacgaaagtaatgtagcatagccgtagcaccaatagtccagaaacaacagcggagtatgaagacagagcggggtgttgcccacacacagagaacacggcggggcaaagggttggtagacaaacacagaagacgtggggggcaaccggcctaacagcaaggacggggctaaaaacc

SEQ ID NO: 126 - DNA, 3470 bp, Homo sapien
ggcgggactcttgctgcgcggaggagccgtgcggaacccgaggctgcgcgcgcgcgcgcgctctctggccgcggcgtggggacagcgaggcgcactggggcctcccagcgcggggccggccgcgccgtccagcccgaggtctacggctttgcgctccgagcccagaggaagatgcctgccggcaccgagctcgggctgcggggctgaacgcctgtcttccaggcgcagcggcagcactgccctcggccggtgtcggtagcggcactcggcgtgccccgggcggacgaagagcgcaggctgggtacaccttgcccgaatcggcggagttcgcagctagcgagggcgggccggccggcccggatgggcgcggggtttgcggcccccgccgggtgctccggagcggcccgggcaccgggggcacgctgagtgccggagccgcggccgcagagagaacttggggcgggggccatgccccggtgcggagtctagagccgagcggagcgccccgcgggcccgcccgcgtctgcggccgttcgggtcctcacagtccccgcgcccggagttcgcagcgcgctccagacaagatggcgcggccggtccggggagggctcggggccccgcgccgctcgccttgccttctccttctctggctgcttttgcttcggctggagccggtgaccgccgcggccggcccgcgggcgccctgcgcggccgcctgcacttgcgctggggactcgctggactgcggtgggcgcgggctggctgcgttgcccggggacctgccctcctggacgcggagcctaaacctgagttacaacaaactctctgagattgaccctgctggttttgaggacttgccgaacctacaggaagtgtacctcaataataatgagttgacagcggtaccatccctgggcgctgcttcatcacatgtcgtctctctctttctgcagcacaacaagattcgcagcgtggaggggagccagctgaaggcctacctttccttagaagtgttagatctgagtttgaacaacatcacggaagtgcggaacacctgctttccacacggaccgcctataaaggagctcaacctggcaggcaatcggattggcaccctggagttgggagcatttgatggtctgtcacggtcgctgctaactcttcgcctgagcaaaaacaggatcacccagcttcctgtaagagcattcaagctacccaggctgacacaactggacctcaatcggaacaggattcggctgatagagggcctcaccttccaggggctcaacagcttggaggtgctgaagcttcagcgaaacaacatcagcaaactgacagatggggccttctggggactgtccaagatgcatgtgctgcacctggagtacaacagcctggtagaagtgaacagcggctcgctctacggcctcacggccctgcatcagctccacgatggagaaagctgaagggacacctgggccacataagatggaacacggtggccgggtcgtatgcagtgactgcaacaccgaagtggactgttactccaggggacaagccttccacccccagcctgtgtccagagacagcgcacagccaagtgcgccaaatggcccggagccgggtgggagtgaccaagagcattctccacatcaccagtgcagcaggactgccgctgggtcctgccccgagtgccaagggtcgctctaccccagtaaccacgatagaatgctgacggctgtgaagaaaaagccaatggcatctctagatgggaaaggggattcttcctggactttagcaaggttgtatcacccggactccacagagctacagcctgcatcttcattaacttcaggcagtccagagcgcgcggaagcccagtacttgcttgtttccaatggccacctccccaaagcatgtgacgccagtcccgagtccacgccactgacaggacagctccccgggaaacagagggtgccactgctgttggcaccaaaaagctaggttttgtctacctcagttcttgtcataccaatctctacgggaaagagaggtaggagaggctgcgaggaagcttgggttcaagcgtcactcatctgtacatagttgtaactcccatgtggagtatcagtcgctcacaggacttggatctgaagcacagtaaacgcaagaggggatttgtgtacaaaaggcaaaaaaagtatttgatatcattgtacataagagttttcagagatttcatatatatcttttacagaggctattttaatctttagtgcatggttaacagaaaaaaattatacaattttgacaatattatttttcgtatcaggttgctgtttaattttggagggggtggggaaatagttctggtgccttaacgcatggctggaatttatagaggctacaaccacatttgttcacaggagtttttggtgcggggtgggaaggatggaaggccttggatttatattgcacttcatagacccctaggctgctgtgcggtgggactccacatgcgccggaaggagcttcaggtgagcactgctcatgtgtggatgcccctgcaacaggcttccctgtctgtagagccaggggtgcaagtgccatccacacttgcagtgaatggcttttccttttaggtttaagtcctgtctgtctgtaaggcgtagaatctgtccgtctgtaaggcgtagaatgagggttgttaatccatcacaagcaaaaggtcagaacagttaaacactgcctttcctcctcctcttattttatgataaaagcaaatgtggccttctcagtatcattcgattgctatttgagacttttaaattaaggtaaaggctgctggtgttggtacctgtggatttttctatactgatgttttcgttttgccaatataatgagtattacattggccttgggggacagaaaggaggaagttctgacttttcagggctaccttatttctactaaggacccagagcaggcctgtccatgccattccttcgcacagatgaaactgagctgggactggaaaggacagcccttgacctgggttctgggtataatttgcacttttgagactggtagctaaccatcttatgagtgccaatgtgtcatttagtaaaacttaaatagaaacaaggtccttcaaatgttcctttggccaaaagctgaagggagttactgagaaaatagttaacaattactgtcaggtgtcatcactgttcaaaaggtaagcacatttagaattttgttcttgacagttaactgactaatcttacttccacaaaatatgtgaatttgctgcttctgagaggcaatgtgaaagagggagtattacttttatgtacaaagttatttatttatagaaattttggtacagtgtacattgaaaaccatgtaaaatattgaagtgtctaacaaatggcattgaagtgtctttaataaaggttcatttataaatgtca

SEQ ID NO: 127 - DNA, 4067 bp, Homo sapien
ggcgggactcttgctgcgcggaggagccgtgcggaacccgaggctgcgcgcgcgcgcgcgctctctggccgcggcgtggggacagcgaggcgcactggggcctcccagcgcggggccggccgcgccgtccagcccgaggtctacggctttgcgctccgagcccagaggaagatgcctgccggcaccgagctcgggctgcggggctgaacgcctgtcttccaggcgcagcggcagcactgccctcggccggtgtcggtagcggcactcggcgtgccccgggcggacgaagagcgcaggctgggtacaccttgcccgaatcggcggagttcgcagctagcgagggcgggccggccggcccggatgggcgcggggtttgcggcccccgccgggtgctccggagcggcccgggcaccgggggcacgctgagtgccggagccgcggccgcagagagaacttggggcgggggccatgccccggtgcggagtctagagccgagcggagcgccccgcgggcccgcccgcgtctgcggccgttcgggtcctcacagtccccgcgcccggagttcgcagcgcgctccagacaagatggcgcggccggtccggggagggctcggggccccgcgccgctcgccttgccttctccttctctggctgcttttgcttcggctggagccggtgaccgccgcggccggcccgcgggcgccctgcgcggccgcctgcacttgcgctggggactcgctggactgcggtgggcgcgggctggctgcgttgcccggggacctgccctcctggacgcggagcctaaacctgagttacaacaaactctctgagattgaccctgctggttttgaggacttgccgaacctacaggaagtgtacctcaataataatgagttgacagcggtaccatccctgggcgctgcttcatcacatgtcgtctctctctttctgcagcacaacaagattcgcagcgtggaggggagccagctgaaggcctacctttccttagaagtgttagatctgagtttgaacaacatcacggaagtgcggaacacctgctttccacacggaccgcctataaaggagctcaacctggcaggcaatcggattggcaccctggagttgggagcatttgatggtctgtcacggtcgctgctaactcttcgcctgagcaaaaacaggatcacccagcttcctgtaagagcattcaagctacccaggctgacacaactggacctcaatcggaacaggattcggctgatagagggcctcaccttccaggggctcaacagcttggaggtgctgaagcttcagcgaaacaacatcagcaaactgacagatggggccttctggggactgtccaagatgcatgtgctgcacctggagtacaacagcctggtagaagtgaacagcggctcgctctacggcctcacggccctgcatcagctccacctcagcaacaattccatcgctcgcattcaccgcaagggctggagcttctgccagaagctgcatgagttggtcctgtccttcaacaacctgacacggctggacgaggagagcctggccgagctgagcagcctgagtgtcctgcgtctcagccacaattccatcagccacattgcggagggtgccttcaagggactcaggagcctgcgagtcttggatctggaccataacgagatttcgggcacaatagaggacacgagcggcgccttctcagggctcgacagcctcagcaagctgactctgtttggaaacaagatcaagtctgtggctaagagagcattctcggggctggaaggcctggagcacctgaaccttggagggaatgcgatcagatctgtccagtttgatgcctttgtgaagatgaagaatcttaaagagctccatatcagcagcgacagcttcctgtgtgactgccagctgaagtggctgcccccgtggctaattggcaggatgctgcaggcctttgtgacagccacctgtgcccacccagaatcactgaagggtcagagcattttctctgtgccaccagagagtttcgtgtgcgatgacttcctgaagccacagatcatcacccagccagaaaccaccatggctatggtgggcaaggacatccggtttacatgctcagcagccagcagcagcagctcccccatgacctttgcctggaagaaagacaatgaagtcctgaccaatgcagacatggagaactttgtccacgtccacgcgcaggacggggaagtgatggagtacaccaccatcctgcacctccgtcaggtcactttcgggcacgagggccgctaccaatgtgtcatcaccaaccactttggctccacctattcacataaggccaggctcaccgtgaatgtgttgccatcattcaccaaaacgccccacgacataaccatccggaccaccaccgtggcccgcctcgaatgtgctgccacaggtcacccaaaccctcagattgcctggcagaaggatggaggcacggatttccccgctgcccgtgagcgacgcatgcatgtcatgccggatgacaggacagctccccgggaaacagagggtgccactgctgttggcaccaaaaagctaggttttgtctacctcagttcttgtcataccaatctctacgggaaagagaggtaggagaggctgcgaggaagcttgggttcaagcgtcactcatctgtacatagttgtaactcccatgtggagtatcagtcgctcacaggacttggatctgaagcacagtaaacgcaagaggggatttgtgtacaaaaggcaaaaaaagtatttgatatcattgtacataagagttttcagagatttcatatatatcttttacagaggctattttaatctttagtgcatggttaacagaaaaaaattatacaattttgacaatattatttttcgtatcaggttgctgtttaattttggagggggtggggaaatagttctggtgccttaacgcatggctggaatttatagaggctacaaccacatttgttcacaggagtttttggtgcggggtgggaaggatggaaggccttggatttatattgcacttcatagacccctaggctgctgtgcggtgggactccacatgcgccggaaggagcttcaggtgagcactgctcatgtgtggatgcccctgcaacaggcttccctgtctgtagagccaggggtgcaagtgccatccacacttgcagtgaatggcttttccttttaggtttaagtcctgtctgtctgtaaggcgtagaatctgtccgtctgtaaggcgtagaatgagggttgttaatccatcacaagcaaaaggtcagaacagttaaacactgcctttcctcctcctcttattttatgataaaagcaaatgtggccttctcagtatcattcgattgctatttgagacttttaaattaaggtaaaggctgctggtgttggtacctgtggatttttctatactgatgttttcgttttgccaatataatgagtattacattggccttgggggacagaaaggaggaagttctgacttttcagggctaccttatttctactaaggacccagagcaggcctgtccatgccattccttcgcacagatgaaactgagctgggactggaaaggacagcccttgacctgggttctgggtataatttgcacttttgagactggtagctaaccatcttatgagtgccaatgtgtcatttagtaaaacttaaatagaaacaaggtccttcaaatgttcctttggccaaaagctgaagggagttactgagaaaatagttaacaattactgtcaggtgtcatcactgttcaaaaggtaagcacatttagaattttgttcttgacagttaactgactaatcttacttccacaaaatatgtgaatttgctgcttctgagaggcaatgtgaaagagggagtattacttttatgtacaaagttatttatttatagaaattttggtacagtgtacattgaaaaccatgtaaaatattgaagtgtctaacaaatggcattgaagtgtctttaataaaggttcatttataaatgtca

SEQ ID NO: 128 - DNA, 5204 bp, Homo sapien
ggcgggactcttgctgcgcggaggagccgtgcggaacccgaggctgcgcgcgcgcgcgcgctctctggccgcggcgtggggacagcgaggcgcactggggcctcccagcgcggggccggccgcgccgtccagcccgaggtctacggctttgcgctccgagcccagaggaagatgcctgccggcaccgagctcgggctgcggggctgaacgcctgtcttccaggcgcagcggcagcactgccctcggccggtgtcggtagcggcactcggcgtgccccgggcggacgaagagcgcaggctgggtacaccttgcccgaatcggcggagttcgcagctagcgagggcgggccggccggcccggatgggcgcggggtttgcggcccccgccgggtgctccggagcggcccgggcaccgggggcacgctgagtgccggagccgcggccgcagagagaacttggggcgggggccatgccccggtgcggagtctagagccgagcggagcgccccgcgggcccgcccgcgtctgcggccgttcgggtcctcacagtccccgcgcccggagttcgcagcgcgctccagacaagatggcgcggccggtccggggagggctcggggccccgcgccgctcgccttgccttctccttctctggctgcttttgcttcggctggagccggtgaccgccgcggccggcccgcgggcgccctgcgcggccgcctgcacttgcgctggggactcgctggactgcggtgggcgcgggctggctgcgttgcccggggacctgccctcctggacgcggagcctaaacctgagttacaacaaactctctgagattgaccctgctggttttgaggacttgccgaacctacaggaagtgtacctcaataataatgagttgacagcggtaccatccctgggcgctgcttcatcacatgtcgtctctctctttctgcagcacaacaagattcgcagcgtggaggggagccagctgaaggcctacctttccttagaagtgttagatctgagtttgaacaacatcacggaagtgcggaacacctgctttccacacggaccgcctataaaggagctcaacctggcaggcaatcggattggcaccctggagttgggagcatttgatggtctgtcacggtcgctgctaactcttcgcctgagcaaaaacaggatcacccagcttcctgtaagagcattcaagctacccaggctgacacaactggacctcaatcggaacaggattcggctgatagagggcctcaccttccaggggctcaacagcttggaggtgctgaagcttcagcgaaacaacatcagcaaactgacagatggggccttctggggactgtccaagatgcatgtgctgcacctggagtacaacagcctggtagaagtgaacagcggctcgctctacggcctcacggccctgcatcagctccacctcagcaacaattccatcgctcgcattcaccgcaagggctggagcttctgccagaagctgcatgagttggtcctgtccttcaacaacctgacacggctggacgaggagagcctggccgagctgagcagcctgagtgtcctgcgtctcagccacaattccatcagccacattgcggagggtgccttcaagggactcaggagcctgcgagtcttggatctggaccataacgagatttcgggcacaatagaggacacgagcggcgccttctcagggctcgacagcctcagcaagctgactctgtttggaaacaagatcaagtctgtggctaagagagcattctcggggctggaaggcctggagcacctgaaccttggagggaatgcgatcagatctgtccagtttgatgcctttgtgaagatgaagaatcttaaagagctccatatcagcagcgacagcttcctgtgtgactgccagctgaagtggctgcccccgtggctaattggcaggatgctgcaggcctttgtgacagccacctgtgcccacccagaatcactgaagggtcagagcattttctctgtgccaccagagagtttcgtgtgcgatgacttcctgaagccacagatcatcacccagccagaaaccaccatggctatggtgggcaaggacatccggtttacatgctcagcagccagcagcagcagctcccccatgacctttgcctggaagaaagacaatgaagtcctgaccaatgcagacatggagaactttgtccacgtccacgcgcaggacggggaagtgatggagtacaccaccatcctgcacctccgtcaggtcactttcgggcacgagggccgctaccaatgtgtcatcaccaaccactttggctccacctattcacataaggccaggctcaccgtgaatgtgttgccatcattcaccaaaacgccccacgacataaccatccggaccaccaccgtggcccgcctcgaatgtgctgccacaggtcacccaaaccctcagattgcctggcagaaggatggaggcacggatttccccgctgcccgtgagcgacgcatgcatgtcatgccggatgacgacgtgtttttcatcactgatgtgaaaatagatgacgcaggggtttacagctgtactgctcagaactcagccggttctatttcagctaatgccaccctgactgtcctagagaccccatccttggtggtccccttggaagaccgtgtggtatctgtgggagaaacagtggccctccaatgcaaagccacggggaaccctccgccccgcatcacctggttcaagggggaccgcccgctgagcctcactgagcggcaccacctgacccctgacaaccagctcctggtggttcagaacgtggtggcagaggatgcgggccgatatacctgtgagatgtccaacaccctgggcacggagcgagctcacagccagctgagcgtcctgcccgcagcaggctgcaggaaggatgggaccacggtaggcatcttcaccattgctgtcgtgagcagcatcgtcctgacgtcactggtctgggtgtgcatcatctaccagaccaggaagaagagtgaagagtacagtgtcaccaacacagatgaaaccgtcgtgccaccagatgttccaagctacctctcttctcaggggaccctttctgaccgacaagaaaccgtggtcaggaccgagggtggccctcaggccaatgggcacattgagagcaatggtgtgtgtccaagagatgcaagccactttccagagcccgacactcacagcgttgcctgcaggcagccaaagctctgtgctgggtctgcgtatcacaaagagccgtggaaagcgatggagaaagctgaagggacacctgggccacataagatggaacacggtggccgggtcgtatgcagtgactgcaacaccgaagtggactgttactccaggggacaagccttccacccccagcctgtgtccagagacagcgcacagccaagtgcgccaaatggcccggagccgggtgggagtgaccaagagcattctccacatcaccagtgcagcaggactgccgctgggtcctgccccgagtgccaagggtcgctctaccccagtaaccacgatagaatgctgacggctgtgaagaaaaagccaatggcatctctagatgggaaaggggattcttcctggactttagcaaggttgtatcacccggactccacagagctacagcctgcatcttcattaacttcaggcagtccagagcgcgcggaagcccagtacttgcttgtttccaatggccacctccccaaagcatgtgacgccagtcccgagtccacgccactgacaggacagctccccgggaaacagagggtgccactgctgttggcaccaaaaagctaggttttgtctacctcagttcttgtcataccaatctctacgggaaagagaggtaggagaggctgcgaggaagcttgggttcaagcgtcactcatctgtacatagttgtaactcccatgtggagtatcagtcgctcacaggacttggatctgaagcacagtaaacgcaagaggggatttgtgtacaaaaggcaaaaaaagtatttgatatcattgtacataagagttttcagagatttcatatatatcttttacagaggctattttaatctttagtgcatggttaacagaaaaaaattatacaattttgacaatattatttttcgtatcaggttgctgtttaattttggagggggtggggaaatagttctggtgccttaacgcatggctggaatttatagaggctacaaccacatttgttcacaggagtttttggtgcggggtgggaaggatggaaggccttggatttatattgcacttcatagacccctaggctgctgtgcggtgggactccacatgcgccggaaggagcttcaggtgagcactgctcatgtgtggatgcccctgcaacaggcttccctgtctgtagagccaggggtgcaagtgccatccacacttgcagtgaatggcttttccttttaggtttaagtcctgtctgtctgtaaggcgtagaatctgtccgtctgtaaggcgtagaatgagggttgttaatccatcacaagcaaaaggtcagaacagttaaacactgcctttcctcctcctcttattttatgataaaagcaaatgtggccttctcagtatcattcgattgctatttgagacttttaaattaaggtaaaggctgctggtgttggtacctgtggatttttctatactgatgttttcgttttgccaatataatgagtattacattggccttgggggacagaaaggaggaagttctgacttttcagggctaccttatttctactaaggacccagagcaggcctgtccatgccattccttcgcacagatgaaactgagctgggactggaaaggacagcccttgacctgggttctgggtataatttgcacttttgagactggtagctaaccatcttatgagtgccaatgtgtcatttagtaaaacttaaatagaaacaaggtccttcaaatgttcctttggccaaaagctgaagggagttactgagaaaatagttaacaattactgtcaggtgtcatcactgttcaaaatcctctgtggctttccatctcactcacagtaatgtccatattcctcactgtgacatacagggttctgtagtttgatgcgacctcyccggtatttccgttgattactga

SEQ ID NO: 129 - DNA, 5273 bp, Homo sapien
ggcgggactcttgctgcgcggaggagccgtgcggaacccgaggctgcgcgcgcgcgcgcgctctctggccgcggcgtggggacagcgaggcgcactggggcctcccagcgcggggccggccgcgccgtccagcccgaggtctacggctttgcgctccgagcccagaggaagatgcctgccggcaccgagctcgggctgcggggctgaacgcctgtcttccaggcgcagcggcagcactgccctcggccggtgtcggtagcggcactcggcgtgccccgggcggacgaagagcgcaggctgggtacaccttgcccgaatcggcggagttcgcagctagcgagggcgggccggccggcccggatgggcgcggggtttgcggcccccgccgggtgctccggagcggcccgggcaccgggggcacgctgagtgccggagccgcggccgcagagagaacttggggcgggggccatgccccggtgcggagtctagagccgagcggagcgccccgcgggcccgcccgcgtctgcggccgttcgggtcctcacagtccccgcgcccggagttcgcagcgcgctccagacaagatggcgcggccggtccggggagggctcggggccccgcgccgctcgccttgccttctccttctctggctgcttttgcttcggctggagccggtgaccgccgcggccggcccgcgggcgccctgcgcggccgcctgcacttgcgctggggactcgctggactgcggtgggcgcgggctggctgcgttgcccggggacctgccctcctggacgcggagcctaaacctgagttacaacaaactctctgagattgaccctgctggttttgaggacttgccgaacctacaggaagtgtacctcaataataatgagttgacagcggtaccatccctgggcgctgcttcatcacatgtcgtctctctctttctgcagcacaacaagattcgcagcgtggaggggagccagctgaaggcctacctttccttagaagtgttagatctgagtttgaacaacatcacggaagtgcggaacacctgctttccacacggaccgcctataaaggagctcaacctggcaggcaatcggattggcaccctggagttgggagcatttgatggtctgtcacggtcgctgctaactcttcgcctgagcaaaaacaggatcacccagcttcctgtaagagcattcaagctacccaggctgacacaactggacctcaatcggaacaggattcggctgatagagggcctcaccttccaggggctcaacagcttggaggtgctgaagcttcagcgaaacaacatcagcaaactgacagatggggccttctggggactgtccaagatgcatgtgctgcacctggagtacaacagcctggtagaagtgaacagcggctcgctctacggcctcacggccctgcatcagctccacctcagcaacaattccatcgctcgcattcaccgcaagggctggagcttctgccagaagctgcatgagttggtcctgtccttcaacaacctgacacggctggacgaggagagcctggccgagctgagcagcctgagtgtcctgcgtctcagccacaattccatcagccacattgcggagggtgccttcaagggactcaggagcctgcgagtcttggatctggaccataacgagatttcgggcacaatagaggacacgagcggcgccttctcagggctcgacagcctcagcaagctgactctgtttggaaacaagatcaagtctgtggctaagagagcattctcggggctggaaggcctggagcacctgaaccttggagggaatgcgatcagatctgtccagtttgatgcctttgtgaagatgaagaatcttaaagagctccatatcagcagcgacagcttcctgtgtgactgccagctgaagtggctgcccccgtggctaattggcaggatgctgcaggcctttgtgacagccacctgtgcccacccagaatcactgaagggtcagagcattttctctgtgccaccagagagtttcgtgtgcgatgacttcctgaagccacagatcatcacccagccagaaaccaccatggctatggtgggcaaggacatccggtttacatgctcagcagccagcagcagcagctcccccatgacctttgcctggaagaaagacaatgaagtcctgaccaatgcagacatggagaactttgtccacgtccacgcgcaggacggggaagtgatggagtacaccaccatcctgcacctccgtcaggtcactttcgggcacgagggccgctaccaatgtgtcatcaccaaccactttggctccacctattcacataaggccaggctcaccgtgaatgtgttgccatcattcaccaaaacgccccacgacataaccatccggaccaccaccgtggcccgcctcgaatgtgctgccacaggtcacccaaaccctcagattgcctggcagaaggatggaggcacggatttccccgctgcccgtgagcgacgcatgcatgtcatgccggatgacgacgtgtttttcatcactgatgtgaaaatagatgacgcaggggtttacagctgtactgctcagaactcagccggttctatttcagctaatgccaccctgactgtcctagagaccccatccttggtggtccccttggaagaccgtgtggtatctgtgggagaaacagtggccctccaatgcaaagccacggggaaccctccgccccgcatcacctggttcaagggggaccgcccgctgagcctcactgagcggcaccacctgacccctgacaaccagctcctggtggttcagaacgtggtggcagaggatgcgggccgatatacctgtgagatgtccaacaccctgggcacggagcgagctcacagccagctgagcgtcctgcccgcagcaggctgcaggaaggatgggaccacggtaggcatcttcaccattgctgtcgtgagcagcatcgtcctgacgtcactggtctgggtgtgcatcatctaccagaccaggaagaagagtgaagagtacagtgtcaccaacacagatgaaaccgtcgtgccaccagatgttccaagctacctctcttctcaggggaccctttctgaccgacaagaaaccgtggtcaggaccgagggtggccctcaggccaatgggcacattgagagcaatggtgtgtgtccaagagatgcaagccactttccagagcccgacactcacagcgttgcctgcaggcagccaaagctctgtgctgggtctgcgtatcacaaagagccgtggaaagcgatggagaaagctgaagggacacctgggccacataagatggaacacggtggccgggtcgtatgcagtgactgcaacaccgaagtggactgttactccaggggacaagccttccacccccagcctgtgtccagagacagcgcacagccaagtgcgccaaatggcccggagccgggtgggagtgaccaagagcattctccacatcaccagtgcagcaggactgccgctgggtcctgccccgagtgccaagggtcgctctaccccagtaaccacgatagaatgctgacggctgtgaagaaaaagccaatggcatctctagatgggaaaggggattcttcctggactttagcaaggttgtatcacccggactccacagagctacagcctgcatcttcattaacttcaggcagtccagagcgcgcggaagcccagtacttgcttgtttccaatggccacctccccaaagcatgtgacgccagtcccgagtccacgccactgacaggacagctccccgggaaacagagggtgccactgctgttggcaccaaaaagctaggttttgtctacctcagttcttgtcataccaatctctacgggaaagagaggtaggagaggctgcgaggaagcttgggttcaagcgtcactcatctgtacatagttgtaactcccatgtggagtatcagtcgctcacaggacttggatctgaagcacagtaaacgcaagaggggatttgtgtacaaaaggcaaaaaaagtatttgatatcattgtacataagagttttcagagatttcatatatatcttttacagaggctattttaatctttagtgcatggttaacagaaaaaaattatacaattttgacaatattatttttcgtatcaggttgctgtttaattttggagggggtggggaaatagttctggtgccttaacgcatggctggaatttatagaggctacaaccacatttgttcacaggagtttttggtgcggggtgggaaggatggaaggccttggatttatattgcacttcatagacccctaggctgctgtgcggtgggactccacatgcgccggaaggagcttcaggtgagcactgctcatgtgtggatgcccctgcaacaggcttccctgtctgtagagccaggggtgcaagtgccatccacacttgcagtgaatggcttttccttttaggtttaagtcctgtctgtctgtaaggcgtagaatctgtccgtctgtaaggcgtagaatgagggttgttaatccatcacaagcaaaaggtcagaacagttaaacactgcctttcctcctcctcttattttatgataaaagcaaatgtggccttctcagtatcattcgattgctatttgagacttttaaattaaggtaaaggctgctggtgttggtacctgtggatttttctatactgatgttttcgttttgccaatataatgagtattacattggccttgggggacagaaaggaggaagttctgacttttcagggctaccttatttctactaaggacccgacagcccttgacctgggttctgggtataatttgcacttttgagactggtagctaaccatcttatgagtgccaatgtgtcatttagtaaaacttaaatagaaacaaggtccttcaaatgttcctttggccaaaagctgaagggagttactgagaaaatagttaacaattactgtcaggtgtcatcactgttcaaaaggtaagcacatttagaattttgttcttgacagttaactgactaatcttacttccacaaaatatgtgaatttgctgcttctgagaggcaatgtgaaagagggagtattacttttatgtacaaagttatttatttatagaaattttggtacagtgtacattgaaaaccatgtaaaatattgaagtgtctaacaaatggcattgaagtgtctttaataaaggttcatttataaatgtca

SEQ ID NO: 130 - DNA, 1322 bp, Homo sapien
attttaatctttagtgcatggttaacatagcctctgtaaaagatatatatgaaatctctgaaaactcttatgtacaatgtttcagagatttcatatatatcttttacagaggctattttaatctttagtgcatggttaacagaaaaaaattatacaattttgacaatattatttttcgtatcaggttgctgtttaattttggagggggtggggaaatagttctggtgccttaacgcatggctggaatttatagaggctacaaccacatttgttcacaggagtttttggtgcggggtgggaaggatggaaggccttggatttatattgcacttcatagacccctaggctgctgtgcggtgggactccacatgcgccggaaggagcttcaggtgagcactgctcatgtgtggatgcccctgcaacaggcttccctgtctgtagagccaggggtgcaagtgccatccacacttgcagtgaatggcttttccttttaggtttaagtcctgtctgtctgtaaggcgtagaatctgtccgtctgtaaggcgtagaatgagggttgttaatccatcacaagcaaaaggtcagaacagttaaacactgcctttcctcctcctcttattttatgataaaagcaaatgtggccttctcagtatcattcgattgctatttgagacttttaaattaaggtaaaggctgctggtgttggtacctgtggatttttctatactgatgttttcgttttgccaatataatgagtattacattggccttgggggacagaaaggaggaagttctgacttttcagggctaccttatttctactaaggacccagagcaggcctgtccatgccattccttcgcacagatgaaactgagctgggactggaaaggacagcccttgacctgggttctgggtataatttgcacttttgagactggtagctaaccatcttatgagtgccaatgtgtcatttagtaaaacttaaatagaaacaaggtccttcaaatgttcctttggccaaaagctgaagggagttactgagaaaatagttaacaattactgtcaggtgtcatcactgttcaaaaggtaagcacatttagaattttgttcttgacagttaactgactaatcttacttccacaaaatatgtgaatttgctgcttctgagaggcaatgtgaaagagggagtattacttttatgtacaaagttatttatttatagaaattttggtacagtgtacattgaaaaccatgtaaaatattgaagtgtctaacaaatggcattgaagtgtctttaataaaggttcatttataaatgtca

SEQ ID NO: 131 - DNA, 3741 bp, Homo sapien
ggcgggactcttgctgcgcggaggagccgtgcggaacccgaggctgcgcgcgcgcgcgcgctctctggccgcggcgtggggacagcgaggcgcactggggcctcccagcgcggggccggccgcgccgtccagcccgaggtctacggctttgcgctccgagcccagaggaagatgcctgccggcaccgagctcgggctgcggggctgaacgcctgtcttccaggcgcagcggcagcactgccctcggccggtgtcggtagcggcactcggcgtgccccgggcggacgaagagcgcaggctgggtacaccttgcccgaatcggcggagttcgcagctagcgagggcgggccggccggcccggatgggcgcggggtttgcggcccccgccgggtgctccggagcggcccgggcaccgggggcacgctgagtgccggagccgcggccgcagagagaacttggggcgggggccatgccccggtgcggagtctagagccgagcggagcgccccgcgggcccgcccgcgtctgcggccgttcgggtcctcacagtccccgcgcccggagttcgcagcgcgctccagacaagatggcgcggccggtccggggagggctcggggccccgcgccgctcgccttgccttctccttctctggctgcttttgcttcggctggagccggtgaccgccgcggccggcccgcgggcgccctgcgcggccgcctgcacttgcgctggggactcgctggactgcggtgggcgcgggctggctgcgttgcccggggacctgccctcctggacgcggagcctaaacctgagttacaacaaactctctgagattgaccctgctggttttgaggacttgccgaacctacaggaagtgtacctcaataataatgagttgacagcggtaccatccctgggcgctgcttcatcacatgtcgtctctctctttctgcagcacaacaagattcgcagcgtggaggggagccagctgaaggcctacctttccttagaagtgttagatctgagtttgaacaacatcacggaagtgcggaacacctgctttccacacggaccgcctataaaggagctcaacctggcaggcaatcggattggcaccctggagttgggagcatttgatggtctgtcacggtcgctgctaactcttcgcctgagcaaaaacaggatcacccagcttcctgtaagagcattcaagctacccaggctgacacaactggacctcaatcggaacaggattcggctgatagagggcctcaccttccaggggctcaacagcttggaggtgctgaagcttcagcgaaacaacatcagcaaactgacagatggggccttctggggactgtccaagatgcatgtgctgcacctggagtacaacagcctggtagaagtgaacagcggctcgctctacggcctcacggccctgcatcagctccacctcagcaacaattccatcgctcgcattcaccgcaagggctggagcttctgccagaagctgcatgagttggtcctgtccttcaacaacctgacacggctggacgaggagagcctggccgagctgagcagcctgagtgtcctgcgtctcagccacaattccatcagccacattgcggagggtgccttcaagggactcaggagcctgcgagtcttggatctggaccataacgagatttcgggcacaatagaggacacgagcggcgccttctcagggctcgacagcctcagcaagctgactctgtttggaaacaagatcaagtctgtggctaagagagcattctcggggctggaaggcctggagcacctgaaccttggagggaatgcgatcagatctgtccagtttgatgcctttgtgaagatgaagaatcttaaagagctccatatcagcagcgacagcttcctgtgtgactgccagctgaagtggctgcccccgtggctaattggcaggatgctgcaggcctttgtgacagccacctgtgcccacccagaatcactgaagggtcagagcattttctctgtgccaccagagagtttcgtgtgcgatgacttcctgaagccacagatcatcacccagccagaaaccaccatggctatggtgggcaaggacatccggtttacatgctcagcagccagcagcagcagctcccccatgacctttgcctggaagaaagacaatgaagtcctgaccaatgcagacatggagaactttgtccacgtccacgcgcaggacggggaagtgatggagtacaccaccatcctgcacctccgtcaggtcactttcgggcacgagggccgctaccaatgtgtcatcaccaaccactttggctccacctattcacataaggccaggctcaccgtgaatgtgttgccatcattcaccaaaacgccccacgacataaccatccggaccaccaccgtggcccgcctcgaatgtgctgccacaggtcacccaaaccctcagattgcctggcagaaggatggaggcacggatttccccgctgcccgtgagcgacgcatgcatgtcatgccggatgacgacgtgtttttcatcactgatgtgaaaatagatgacgcaggggtttacagctgtactgctcagaactcagccggttctatttcagctaatgccaccctgactgtcctagagaccccatccttggtggtccccttggaagaccgtgtggtatctgtgggagaaacagtggccctccaatgcaaagccacggggaaccctccgccccgcatcacctggttcaagggggaccgcccgctgagcctcactgagcggcaccacctgacccctgacaaccagctcctggtggttcagaacgtggtggcagaggatgcgggccgatatacctgtgagatgtccaacaccctgggcacggagcgagctcacagccagctgagcgtcctgcccgcagcaggctgcaggaaggatgggaccacggtaggcatcttcaccattgctgtcgtgagcagcatcgtcctgacgtcactggtctgggtgtgcatcatctaccagaccaggaagaagagtgaagagtacagtgtcaccaacacagatgaaaccgtcgtgccaccagatgttccaagctacctctcttctcaggggaccctttctgaccgacaagaaaccgtggtcaggaccgagggtggccctcaggccaatgggcacattgagagcaatggtaaggcctcagtaaccgtgaagcagagctctgctgtgactgtgtctctgggtgctggaggtggcctccaggtctttacagggcaggtacctggcattagatggggcaaacttggtgaagtagaaggcggtatgactaagggctgctattttggacccagtcttcatgagttctgcaaggttttaaagtcctgtcccctcaggaagccactggattgggcttagcatctccctggcaggataaagtaggcttgcctggagtagcagctggaaagggcattacggtgcatgaacccagccaacccattccttacatggggaacgtgcccaggtctgctctgtgatccagtcttacactggaaagctgtcaccaggatgaggtacttccaacggtgggggcctctgagcacttgcctgagactgtagaggctcaccctgagacagctgctcatttcacaaggccagcctgcctgctgggaagtagtagcagaaaacacgctgcttgccagaccagcagccccaccgctctgaagaacttttt

SEQ ID NO: 132 - DNA, 4331 bp, Homo sapien
ggcgggactcttgctgcgcggaggagccgtgcggaacccgaggctgcgcgcgcgcgcgcgctctctggccgcggcgtggggacagcgaggcgcactggggcctcccagcgcggggccggccgcgccgtccagcccgaggtctacggctttgcgctccgagcccagaggaagatgcctgccggcaccgagctcgggctgcggggctgaacgcctgtcttccaggcgcagcggcagcactgccctcggccggtgtcggtagcggcactcggcgtgccccgggcggacgaagagcgcaggctgggtacaccttgcccgaatcggcggagttcgcagctagcgagggcgggccggccggcccggatgggcgcggggtttgcggcccccgccgggtgctccggagcggcccgggcaccgggggcacgctgagtgccggagccgcggccgcagagagaacttggggcgggggccatgccccggtgcggagtctagagccgagcggagcgccccgcgggcccgcccgcgtctgcggccgttcgggtcctcacagtccccgcgcccggagttcgcagcgcgctccagacaagatggcgcggccggtccggggagggctcggggccccgcgccgctcgccttgccttctccttctctggctgcttttgcttcggctggagccggtgaccgccgcggccggcccgcgggcgccctgcgcggccgcctgcacttgcgctggggactcgctggactgcggtgggcgcgggctggctgcgttgcccggggacctgccctcctggacgcggagcctaaacctgagttacaacaaactctctgagattgaccctgctggttttgaggacttgccgaacctacaggaagtgtacctcaataataatgagttgacagcggtaccatccctgggcgctgcttcatcacatgtcgtctctctctttctgcagcacaacaagattcgcagcgtggaggggagccagctgaaggcctacctttccttagaagtgttagatctgagtttgaacaacatcacggaagtgcggaacacctgctttccacacggaccgcctataaaggagctcaacctggcaggcaatcggattggcaccctggagttgggagcatttgatggtctgtcacggtcgctgctaactcttcgcctgagcaaaaacaggatcacccagcttcctgtaagagcattcaagctacccaggctgacacaactggacctcaatcggaacaggattcggctgatagagggcctcaccttccaggggctcaacagcttggaggtgctgaagcttcagcgaaacaacatcagcaaactgacagatggggccttctggggactgtccaagatgcatgtgctgcacctggagtacaacagcctggtagaagtgaacagcggctcgctctacggcctcacggccctgcatcagctccacctcagcaacaattccatcgctcgcattcaccgcaagggctggagcttctgccagaagctgcatgagttggtcctgtccttcaacaacctgacacggctggacgaggagagcctggccgagctgagcagcctgagtgtcctgcgtctcagccacaattccatcagccacattgcggagggtgccttcaagggactcaggagcctgcgagtcttggatctggaccataacgagatttcgggcacaatagaggacacgagcggcgccttctcagggctcgacagcctcagcaagctgactctgtttggaaacaagatcaagtctgtggctaagagagcattctcggggctggaaggcctggagcacctgaaccttggagggaatgcgatcagatctgtccagtttgatgcctttgtgaagatgaagaatcttaaagagctccatatcagcagcgacagcttcctgtgtgactgccagctgaagtggctgcccccgtggctaattggcaggatgctgcaggcctttgtgacagccacctgtgcccacccagaatcactgaagggtcagagcattttctctgtgccaccagagagtttcgtgtgcgatgacttcctgaagccacagatcatcacccagccagaaaccaccatggctatggtgggcaaggacatccggtttacatgctcagcagccagcagcagcagctcccccatgacctttgcctggaagaaagacaatgaagtcctgaccaatgcagacatggagaactttgtccacgtccacgcgcaggacggggaagtgatggagtacaccaccatcctgcacctccgtcaggtcactttcgggcacgagggccgctaccaatgtgtcatcaccaaccactttggctccacctattcacataaggccaggctcaccgtgaatgtgttgccatcattcaccaaaacgccccacgacataaccatccggaccaccaccgtggcccgcctcgaatgtgctgccacaggtcacccaaaccctcagattgcctggcagaaggatggaggcacggatttccccgctgcccgtgagcgacgcatgcatgtcatgccggatgacgacgtgtttttcatcactgatgtgaaaatagatgacgcaggggtttacagctgtactgctcagaactcagccggttctatttcagctaatgccaccctgactgtcctagagaccccatccttggtggtccccttggaagaccgtgtggtatctgtgggagaaacagtggccctccaatgcaaagccacggggaaccctccgccccgcatcacctggttcaagggggaccgcccgctgagcctcactgagcggcaccacctgacccctgacaaccagctcctggtggttcagaacgtggtggcagaggatgcgggccgatatacctgtgagatgtccaacaccctgggcacggagcgagctcacagccagctgagcgtcctgcccgcagcaggctgcaggaaggatgggaccacggtaggcatcttcaccattgctgtcgtgagcagcatcgtcctgacgtcactggtctgggtgtgcatcatctaccagaccaggaagaagagtgaagagtacagtgtcaccaacacagacaggtcaggccctgccagcggagctgactttcaaggagggaggaatggcagtgatgctggggaactgggccgggttccagtggcttttgaaagaatcgcactgtgttcagaactcctgagggtttagtcccactaattccattttaactttgaggaacttaaccttaaacaggaatactctcaaatttaaccttaaacaggaatactcacaaatacaagtaactgacgcaccttgcagttttccctctccttgctaactcagaggccgcctatgcacaggccctgctgccacgtagtaggttgttcctgaaacagcgcggtacttctgtgagccccggctttccatcactggtctccacttcttgtggcgtctggcatctgctggctgcgctcttcacactgggtgtagagtaaagctgagcaggctctgggagggcctgttgcgtacatggactccatgtcatctctctgcacagcgctgatggtcgtcactgggaggatcccctttctgagcttgacagtgaacgtgtgtctgcatttcttgtcactgagaccctggtgttctatttgttctgtctccttgcagatgatgaaaccgtcgtgccaccagatgttccaagctacctctcttctcaggggaccctttctgaccgacaagaaaccgtggtcaggaccgagggtggccctcaggccaatgggcacattgagagcaatggtaaggcctcagtaaccgtgaagcagagctctgctgtgactgtgtctctgggtgctggaggtggcctccaggtctttacagggcaggtacctggcattagatggggcaaacttggtgaagtagaaggcggtatgactaagggctgctattttggacccagtcttcatgagttctgcaaggttttaaagtcctgtcccctcaggaagccactggattgggcttagcatctccctggcaggataaagtaggcttgcctggagtagcagctggaaagggcattacggtgcatgaacccagccaacccattccttacatggggaacgtgcccaggtctgctctgtgatccagtcttacactggaaagctgtcaccaggatgaggtacttccaacggtgggggcctctgagcacttgcctgagactgtagaggctcaccctgagacagctgctcatttcacaaggccagcctgcctgctgggaagtagtagcagaaaacacgctgcttgccagaccagcagccccaccgctctgaagaacttttt

SEQ ID NO: 133 - DNA, 2789 bp, Homo sapien
ggcgggactcttgctgcgcggaggagccgtgcggaacccgaggctgcgcgcgcgcgcgcgctctctggccgcggcgtggggacagcgaggcgcactggggcctcccagcgcggggccggccgcgccgtccagcccgaggtctacggctttgcgctccgagcccagaggaagatgcctgccggcaccgagctcgggctgcggggctgaacgcctgtcttccaggcgcagcggcagcactgccctcggccggtgtcggtagcggcactcggcgtgccccgggcggacgaagagcgcaggctgggtacaccttgcccgaatcggcggagttcgcagctagcgagggcgggccggccggcccggatgggcgcggggtttgcggcccccgccgggtgctccggagcggcccgggcaccgggggcacgctgagtgccggagccgcggccgcagagagaacttggggcgggggccatgccccggtgcggagtctagagccgagcggagcgccccgcgggcccgcccgcgtctgcggccgttcgggtcctcacagtccccgcgcccggagttcgcagcgcgctccagacaagatggcgcggccggtccggggagggctcggggccccgcgccgctcgccttgccttctccttctctggctgcttttgcttcggctggagccggtgaccgccgcggccggcccgcgggcgccctgcgcggccgcctgcacttgcgctggggactcgctggactgcggtgggcgcgggctggctgcgttgcccggggacctgccctcctggacgcggagcctaaacctgagttacaacaaactctctgagattgaccctgctggttttgaggacttgccgaacctacaggaagtgtacctcaataataatgagttgacagcggtaccatccctgggcgctgcttcatcacatgtcgtctctctctttctgcagcacaacaagattcgcagcgtggaggggagccagctgaaggcctacctttccttagaagtgttagatctgagtttgaacaacatcacggaagtgcggaacacctgctttccacacggaccgcctataaaggagctcaacctggcaggcaatcggattggcaccctggagttgggagcatttgatggtctgtcacggtcgctgctaactcttcgcctgagcaaaaacaggatcacccagcttcctgtaagagcattcaagctacccaggctgacacaactggacctcaatcggaacaggattcggctgatagagggcctcaccttccaggggctcaacagcttggaggtgctgaagcttcagcgaaacaacatcagcaaactgacagatggggccttctggggactgtccaagatgcatgtgctgcacctggagtacaacagcctggtagaagtgaacagcggctcgctctacggcctcacggccctgcatcagctccacctcagcaacaattccatcgctcgcattcaccgcaagggctggagcttctgccagaagctgcatgagttggtcctgtccttcaacaacctgacacggctggacgaggagagcctggccgagctgagcagcctgagtgtcctgcgtctcagccacaattccatcagccacattgcggagggtgccttcaagggactcaggagcctgcgagtcttggatctggaccataacgagatttcgggcacaatagaggacacgagcggcgccttctcagggctcgacagcctcagcaagctgactctgtttggaaacaagatcaagtctgtggctaagagagcattctcggggctggaaggcctggagcacctgaaccttggagggaatgcgatcagatctgtccagtttgatgcctttgtgaagatgaagaatcttaaagagctccatatcagcagcgacagcttcctgtgtgactgccagctgaagtggctgcccccgtggctaattggcaggatgctgcaggcctttgtgacagccacctgtgcccacccagaatcactgaagggtcagagcattttctctgtgccaccagagagtttcgtgtgcgatgacttcctgaagccacagatcatcacccagccagaaaccaccatggctatggtgggcaaggacatccggtttacatgctcagcagccagcagcagcagctcccccatgacctttgcctggaagaaagacaatgaagtcctgaccaatgcagacatggagaactttgtccacgtccacgcgcaggacggggaagtgatggagtacaccaccatcctgcacctccgtcaggtcactttcgggcacgagggccgctaccaatgtgtcatcaccaaccactttggctccacctattcacataaggccaggctcaccgtgaatgtgttgccatcattcaccaaaacgccccacgacataaccatccggaccaccaccgtggcccgcctcgaatgtgctgccacaggtcacccaaaccctcagattgcctggcagaaggatggaggcacggatttccccgctgcccgtgagcgacgcatgcatgtcatgccggatgacgacgtgtttttcatcactgatgtgaaaatagatgacgcaggggtttacagctgtactgctcagaactcagccggttctatttcagctaatgccaccctgactgtcctagagaccccatccttggtggtccccttggaagaccgtgtggtatctgtgggagaaacagtggccctccaatgcaaagccacggggaaccctccgccccgctccccmcaatgaaataaagttwttttytcwttccca

SEQ ID NO: 134 - DNA, 3886 bp, Homo sapien
ggcgggactcttgctgcgcggaggagccgtgcggaacccgaggctgcgcgcgcgcgcgcgctctctggccgcggcgtggggacagcgaggcgcactggggcctcccagcgcggggccggccgcgccgtccagcccgaggtctacggctttgcgctccgagcccagaggaagatgcctgccggcaccgagctcgggctgcggggctgaacgcctgtcttccaggcgcagcggcagcactgccctcggccggtgtcggtagcggcactcggcgtgccccgggcggacgaagagcgcaggctgggtacaccttgcccgaatcggcggagttcgcagctagcgagggcgggccggccggcccggatgggcgcggggtttgcggcccccgccgggtgctccggagcggcccgggcaccgggggcacgctgagtgccggagccgcggccgcagagagaacttggggcgggggccatgccccggtgcggagtctagagccgagcggagcgccccgcgggcccgcccgcgtctgcggccgttcgggtcctcacagtccccgcgcccggagttcgcagcgcgctccagacaagatggcgcggccggtccggggagggctcggggccccgcgccgctcgccttgccttctccttctctggctgcttttgcttcggctggagccggtgaccgccgcggccggcccgcgggcgccctgcgcggccgcctgcacttgcgctggggactcgctggactgcggtgggcgcgggctggctgcgttgcccggggacctgccctcctggacgcggagcctaaacctgagttacaacaaactctctgagattgaccctgctggttttgaggacttgccgaacctacaggaagtgtacctcaataataatgagttgacagcggtaccatccctgggcgctgcttcatcacatgtcgtctctctctttctgcagcacaacaagattcgcagcgtggaggggagccagctgaaggcctacctttccttagaagtgttagatctgagtttgaacaacatcacggaagtgcggaacacctgctttccacacggaccgcctataaaggagctcaacctggcaggcaatcggattggcaccctggagttgggagcatttgatggtctgtcacggtcgctgctaactcttcgcctgagcaaaaacaggatcacccagcttcctgtaagagcattcaagctacccaggctgacacaactggacctcaatcggaacaggattcggctgatagagggcctcaccttccaggggctcaacagcttggaggtgctgaagcttcagcgaaacaacatcagcaaactgacagatggggccttctggggactgtccaagatgcatgtgctgcacctggagtacaacagcctggtagaagtgaacagcggctcgctctacggcctcacggccctgcatcagctccacctcagcaacaattccatcgctcgcattcaccgcaagggctggagcttctgccagaagctgcatgagttggtcctgtccttcaacaacctgacacggctggacgaggagagcctggccgagctgagcagcctgagtgtcctgcgtctcagccacaattccatcagccacattgcggagggtgccttcaagggactcaggagcctgcgagtcttggatctggaccataacgagatttcgggcacaatagaggacacgagcggcgccttctcagggctcgacagcctcagcaagctgactctgtttggaaacaagatcaagtctgtggctaagagagcattctcggggctggaaggcctggagcacctgaaccttggagggaatgcgatcagatctgtccagtttgatgcctttgtgaagatgaagaatcttaaagagctccatatcagcagcgacagcttcctgtgtgactgccagctgaagtggctgcccccgtggctaattggcaggatgctgcaggcctttgtgacagccacctgtgcccacccagaatcactgaagggtcagagcattttctctgtgccaccagagagtttcgtgtgcgatgacttcctgaagccacagatcatcacccagccagaaaccaccatggctatggtgggcaaggacatccggtttacatgctcagcagccagcagcagcagctcccccatgacctttgcctggaagaaagacaatgaagtcctgaccaatgcagacatggagaactttgtccacgtccacgcgcaggacggggaagtgatggagtacaccaccatcctgcacctccgtcaggtcactttcgggcacgagggccgctaccaatgtgtcatcaccaaccactttggctccacctattcacataaggccaggctcaccgtgaatggtatggaaacaccatctttgttatagtaccagaatcctacaaagcacactcctgattgccctttcagctttccatgtagagatgactgagacaggacacacacatgcttctgtggggcactgttaaatcctattgttgcctgggtttgccccagagcaagttttgcagatttcaagggttattcacaatgagttacttgtttttggtgagttttaaaaatctcgttattggccgggtgctgtggctcatgcctgtaatcccagcagttgggagactgaggtgggcagatcacttgaagccaggagttcgagactagtgtggccaacatagtgaaaccccgtctctactaaaaatacaaaaattagccaggtgtggtggcacatgcctgtaatcccagctacttgggaggctgaggcacaagaattgcttgaacccaggaggtggacgttgcagtgagccgagatcactccactgcattccagcctgggtgtcaaagtgagactgtctcaaaaacaaaacaaaaactagttattaagtcaaattgtggagagctaagccttgttttgtccagttcttatcctctataagccaagagatctggcttccaaattccaaataccccttagcctggggaagctgctgttctttgagtagatggcacagcattggagtcagaggctagctactgctccagagactgtggagtgcaaggctggtgtgagccctggcctgaaagacacagtgtcctggcagttgacaggtttttactcattaaccagccttggagcttgtcaaggggaccatgtgttattgtgtgtttggaggaggggggtggggagtagatagcttgaagagtttactgtcccaccccagtaacctaatggggttatcctgattactaactctctagttaaaaagaattggcttgagaatcatcagaatggtggatctgctttgctctttaagcccccacagatcacagcgaaacaccttctttaccacactgtagtggggttgtcttggcttattccaagtcctcacagcttccgaaagactcagctgtttgttagactctccccaaaattgacgttgacaggaactctggtggtgcctgacacgtggctggatgcgtcccactctgtcaggacatcgatctttaggctgagcaagctagcaagctgaatgcttcctgcctgggtatacggcagtgggcaggaacagcctgggtgaacaaccatccaaatggatgagccatcccattcatcccatgaacacccatccaaacggatgagccatcccattgctctcccaaggtggaggcatgcccaccttccctctgtaattccatctccacagcctctctcttggtgggtaaagcaggcaagcatcaggcctacctagtgtggatgggcaccccctgcaactcccgtataggcactgccatgtagagtaaaagcctttgctttgaagggactatagccagcctagggtgtacaatgcaaggctgatggga

SEQ ID NO: 135 - DNA, 1822 bp, Homo sapien
ggcgggactcttgctgcgcggaggagccgtgcggaacccgaggctgcgcgcgcgcgcgcgctctctggccgcggcgtggggacagcgaggcgcactggggcctcccagcgcggggccggccgcgccgtccagcccgaggtctacggctttgcgctccgagcccagaggaagatgcctgccggcaccgagctcgggctgcggggctgaacgcctgtcttccaggcgcagcggcagcactgccctcggccggtgtcggtagcggcactcggcgtgccccgggcggacgaagagcgcaggctgggtacaccttgcccgaatcggcggagttcgcagctagcgagggcgggccggccggcccggatgggcgcggggtttgcggcccccgccgggtgctccggagcggcccgggcaccgggggcacgctgagtgccggagccgcggccgcagagagaacttggggcgggggccatgccccggtgcggagtctagagccgagcggagcgccccgcgggcccgcccgcgtctgcggccgttcgggtcctcacagtccccgcgcccggagttcgcagcgcgctccagacaagatggcgcggccggtccggggagggctcggggccccgcgccgctcgccttgccttctccttctctggctgcttttgcttcggctggagccggtgaccgccgcggccggcccgcgggcgccctgcgcggccgcctgcacttgcgctggggactcgctggactgcggtgggcgcgggctggctgcgttgcccggggacctgccctcctggacgcggagcctaaacctgagttacaacaaactctctgagattgaccctgctggttttgaggacttgccgaacctacaggaagtgtacctcaataataatgagttgacagcggtaccatccctgggcgctgcttcatcacatgtcgtctctctctttctgcagcacaacaagattcgcagcgtggaggggagccagctgaaggcctacctttccttagaagtgttagatctgagtttgaacaacatcacggaagtgcggaacacctgctttccacacggaccgcctataaaggagctcaacctggcaggcaatcggattggcaccctggagttgggagcatttgatggtctgtcacggtcgctgctaactcttcgcctgagcaaaaacaggatcacccagcttcctgtaagagcattcaagctacccaggctgacacaactggacctcaatcggaacaggattcggctgatagagggcctcaccttccaggggctcaacagcttggaggtgctgaagcttcagcgaaacaacatcagcaaactgacagatggggccttctggggactgtccaagatgcatgtgctgcacctggagtacaacagcctggtagaagtgaacagcggctcgctctacggcctcacggccctgcatcagctccacctcagcaacaattccatcgctcgcattcaccgcaagggctggagcttctgccagaagctgcatgagttgtaagtgtcctcggctctgggctgtggcagtgtttttagacactgcttggaggtgaaagtgctaggcctggttcgttccaccacacagtggcctcggggagggctcagagacaggccagtagccctgttcccaaaccagccaggcccagggtggaaccctcagcgatttgagccccagtcccttcctcatctccccttcacttcctctgcatttggattagcaggggctccaggagtagcagctaggtccctgcagggagccttggcccccaaggtcctgttgggtttggagacagttccagg

SEQ ID NO: 136 - DNA, 626 bp, Homo sapien
tttgactcagcttcctctcactgaaaccataatcagtctcatctctccatcactaaacttcaccacccaagggttggtggtccttggagagagactgggccagacaaggtgatttctgcctaacactgggaggggccttttttaggccagacggcacatgcaattccagcctatcatcactattaaattctaataaagataaaagtatttcatttcagaaaggggaaggcctgcgtgcctcaaacccgtaatctcagcgcaggtcagctttccacctgcccctcactggacagacttatcaggtagcactaccttaattgtgtgttttctttttctttttctttctctcaacccttcctgtttcgctttccttccctggccttaatttctggatgtttggaaactacaggactctgtttggaaacaagatcaagtctgtggctaagagagcattctcggggctggaaggcctggagcacctgaaccttggagggaatgcgatcagatctgtccagtttgatgcctttgtgaagatgaagaatcttaaagagctgtaagtatctggattccctgggtctgattaatggtagtggagactttcagagtaagaaacttctgcaattgca

SEQ ID NO: 137 - DNA, 624 bp, Homo sapien
agcggggcgcggaggagcgtgcggaaccgaggctgcgcgcgcgcgcgcgcctctggccgcggcgtggggacagcgaggcgcactggggctcccagcgcggggcggcgcgccgccagcccgaggtctacggctgcgcccgacccaaggaagatgctgccgcacgaccgggctgcggggctgaacgcctgtcttccaggcgcagcggcagcactgccctcggcggtgtcggtagcggcactcggcgtgccccgggcggacgaagagcgcaggctgggtacaccttgtccgaatcggcggagttcgcagctagtgagggcggccggcggcccggatgggcgcgggttgcggccccgacgggtgctccggagcggccgggcaccgggggcactcttgagtgccggaaccgcggccgcagagagaacttggggcggtggccatgccccggtgcggagtctagagccgagtcggagcgcccgagggtgcccggccggtctgcggcgtcggggtctcacagtcccagacgccgtagttcgagtgcgctccagacaaagatggcgcggcggtccgggaagggctccgaggcccgatgcgttcgcttgccttctcctcttctggttggaaagg

SEQ ID NO: 138 - DNA, 321 bp, Homo sapien
acacccccctgctcccagctgcctttaactagcagattgaggaaagttggtctataaatatctcagtgtccttgcctctcatgtgagccaactgtgggatgtgtgtttcacactggcactcaaaaatttcttatggaattaagctcctagagtgatgattggcttggtaacttacctattactggctgccttctcttcattgtctcatttttgtctccccctcctttatctctcaaataaatacttatacttgaatccttactctaggattaggcagattggcccaaatctggggaacccacattgagatggaccctataa

SEQ ID NO: 139 - DNA, 524 bp, Homo sapien
acacccccctgctcccagctgcctttaactagcagattgaggaaagttggtctataaatatctcagtgtccttgcctctcatgtgagccaactgtgggatgtgtgtttcacactggcactcaaaaatttcttatggaattaagctcctagagtgatgattggcttggtaacttacctattactggctgccttctcttcattgtctcatttttgtctccccctcctttatctctcaaataaatacttatacttgaatccttactctaggattaggcagattggcccaaatctggggaacccacattgagatggaccctataatttctcttttttaaaaaaacaatcaggctgggcgcagtggctcacacctgtaatcccagaactctgggaggtcgaggcaggcagattgcttgaggtcaagagtttaagaccagcctggccaacatggcaaaaccccatctctactaaaaatacaaaaattagcctggtgtggtggcgtatgcatgcctgtagtcccagctact

SEQ ID NO: 140 - DNA, 405 bp, Homo sapien
tctcccctacaacttttaaatactaaaattaaaaatgtccccacccaccaatattggaactccgtggtatccataagctgggttgcatgttagtgattgtaataagcaataaaaatccttgcatgtcaatattttattaaatttgattattcatggatttgtgaccattattatttgctgtttattggtttgttgttgtttttaaaatattttacttggacttatggaccacatgtttgtttcagaaattcttcaaaagacagcaaatccctagtaagtgggaagaaaaatcacttaacagtattccaagtacctcaaaagatgcaaatatggaaagatgaatatgaaaaagggtactcctagagtttatcaattgtctatccctggagaaagtttccattctcc

SEQ ID NO: 141 - DNA, 611 bp, Homo sapien
  misc_feature (11)..(12): n=a,c,g or t
  misc_feature (89)..(89): n=a,c,g or t
gcacgagcgcnnccagtccctattccgttccatagctcaggatgctaaatgagtttcaaccgtgtgacccttcttcaagtctcatattntgtgggactcccatgtgcacctacattattaaatatgggttttctttctgttaatttgtcttacgtcaattcataacccaccaagaagcccagagcggtggaggaaagccatttctctctcccctacaacttttaaatactaaaattaaaaatgtccccacccaccaatattggaactccgtggtatccataagctgggttgcatgttagtgattgtaataagcaataaaaatccttgcatgtcaatattttattaaatttgattattcatggatttgtgaccattattatttgctgtttattggtttgttgttgtttttaaaatattttacttggacttatggaccacatgtttgtttcagaaattcttcaaaagacagcaaatccctagtaagtgggaagaaaaatcacttaacagtattccaagtacctcaaaagatgcaaatatggaaagatgaatatgaaaaagggtactcctagagtttatcaattgtctatccctggagaaagtttccattctcc

SEQ ID NO: 142 - DNA, 610 bp, Homo sapien
ccagaagccccaagcccctattccgttccatagctcaggatgctaaatgagtttcaaccgtgtgacccttcttcaagtctcatattttgtgggactcccatgtgcacctacattattaaatatggggtttctttctgttaatttgtcttacgtcaattcataacccagccaagaaacccagagcggtggaggaaagccatttctctctcccctacaacttttaaatactaaaattaaaaatgtccccacccaccaatattggaactccgtggtatccataagctgggttgcatgttagtgattgtaataagcaataaaaatccttgcatgtcaatattttattaaatttgattattcatggatttgtgaccattattatttgctgtttattggtttgttgttgtttttaaaatattttacttggacttatggaccacatgtttgtttcagaaattcttcaaaagacagcaaatccctagtaagtgggaagaaaaatcacttaacagtattccaagtacctcaaaagatgcaaatatggaaagatgaatatgaaaaagggtactcctagagtttatcaattgtctatccctggagaaagtttccattctcc

SEQ ID NO: 143 - DNA, 407 bp, Homo sapien
ccagaagccccaagcccctattccgttccatagctcaggatgctaaatgagtttcaaccgtgtgacccttcttcaagtctcatattttgtgggactcccatgtgcacctacattattaaatatggggtttctttctgttaatttgtcttacgtcaattcataacccagccaagaaacccagagcggtggaggaaagccatttctctctcccctacaacttttaaatactaaaattaaaaatgtccccacccaaatttcatcttggatcgtagctcccacaattcccacatgtcatgggagggagcgggtaggatgtaattgaatcatgggggcgggtctttcctgtgctgttgtgataatgaataagtctcatgagacctggtggttttataaaggggagtttgcct

SEQ ID NO: 144 - DNA, 437 bp, Homo sapien
  misc_feature (8)..(8): n=a,c,g or t
  misc_feature (67)..(67): n=a,c,g or t
ctctaagngacgattatgatggtttattttcattgtatacacttatacatatactattcaaagccgntggagtcgggaatggtgaatggaaactttctccaccctagacaattgataaactctaggagtaccctttttcatattcatctttccatatttgcatcttttgaggtacttggaatactgttaagtgatttttcttcccacttactagggatttgctgtcttttgaagaatttctgaaacaaacatgtggtccataagtccaagtaaaatattttaaaaacaacgacaaaccaataaacagcaaataataatggccacaaatccatgaataatcaaatttaataaaatattgacatacaaggatttttattgcttattacaatcactaacatgcaacccagcttatggataccacggagttccaatattgg

SEQ ID NO: 145 - DNA, 325 bp, Homo sapien
tcaaaaaactaatattgatggcaatgaacaaaatattaaacaggcttttttttttagggccaaaaagaagtaattgggctcttcacccaaattacttcaccctacaggctgaaggattcagatgaagtggagagtgaatcacttctgttaagaggcaaaggatgtcttgtatatgtattagtggcctatgactatttaacaagttattcgtaaaacttagtagcttaaaacaataaacattgatctcggaattttggagggtcagaaatctgtcatggcttaacggggtcctcgggatttggggtctctcacaaagctgcagtca

SEQ ID NO: 146 - DNA, 325 bp, Homo sapien
tcaaaaaactaatattgatggcaatgaacaaaatattaaacaggcttttttttttagggccaaaaagaagtaattgggctcttcacccaaattacttcaccctacaggctgaaggattcagatgaagtggagagtgaatcacttctgttaagaggcaaaggatgtctgggatatgtattagtggcctatgactatttaacaagttattcgtaaaacttagtagcttaaaacaataaacattgatctcggaattttggagggtcagaaatctgtcatggcttaacggggtcctcgggatttggggtctctcacaaagctgcagtca

SEQ ID NO: 147 - DNA, 654 bp, Homo sapien
tcattcaagaactagacacttactgagtactctgtgagcatcaggtaacaaatcagaccctagggttataaggaagatccatcaagtgggcccagagtaggtaaggatctcacccctaccagtgataacagatttaaagttaaagctagaccactgactcccagagttttccaaaatcccagtgctctttccactagaacaatgcctctcaaatgttgactgcacttatagtaaaaaatacattctgaagcaccactcagtataaacacatgcatttctgatatattctattgaattctattttatttcacattcttaaaatgttcatcttcacatactaaattggttttacggctcaaaggttacaagacattgctctcgaaatacatttttgaaactttctgtagaatttcaaagtcagaaataattcctaaaaattactttttgtcacacaatgaatatgtatccctccccgaaaagcaggacactatcaaataatcacataacccagaaagacagggcagctgtcagttggggagcaggaggtaactaaacgtaatctccatcagctttccctaaagccccccccaaataatgccccaatttaaggaaaactgtttgctacgtaaaaacagcttggctggaagggagctg

SEQ ID NO: 148 - DNA, 628 bp, Homo sapien
ttggggggggctttagggaaagctgatggagattacgtwtagttacctcctgctccccaactgacagctgccctgtctttctgggttatgtgattatttgatagtgtcctgcttttcggggagggatacatattcattgtgtgacaaaaagtaatttttaggaattatttctgactttgaaattctacagaaagtttcaaaaatgtatttcgagagcaatgtcttgtaacctttgagccgtaaaaccaatttagtatgtgaagatgaacattttaagaatgtgaaataaaatagaattcaatagaatatatcagaaatgcatgtgtttatactgagtggtgcttcagcaatgtattttttactataagtgcagtcaacatttgagaggcattgttctagtggaaagagcactgggattttggaacacaaccccctttccttttggggggggggaaaagggtttcaaagggttggaggtttcccctttagctttaactttaaatctgttatcactggtaggggtgagatccttacctactctgggcccacttgatggatcttccttataaccctagggtctgatttgttacctgatgctcacagagtactcagtaagtgtctagttctt

SEQ ID NO: 149 - DNA, 656 bp, Homo sapien
gccagctcccttccagccaagctgtttttacgtagcaaacagttttccttaaattggggcattatttggggggggctttagggaaagctgatggagattacgtttagttacctcctgctccccaactgacagctgccctgtctttctgggttatgtgattatttgatagtgtcctgcttttcggggagggatacatattcattgtgtgacaaaaagtaatttttaggaattatttctgactttgaaattctacagaaagtttcaaaaatgtatttcgagagcaatgtcttgtaacctttgagccgtaaaaccaatttagtatgtgaagatgaacattttaagaatgtgaaataaaatagaattcaatagaatatatcagaaatgcatgtgtttatactgagtggtgcttcagaatgtattttttactataagtgcagtcaacatttgagaggcattgttctagtggaaagagcactgggattttggaaaactctgggagtcagtggtctagctttaactttaaatctgttatcactggtaggggtgagatccttacctactctgggcccacttgatggatcttccttataaccctagggtctgatttgttacctgatgctcacagagtactcagtaagtgtctagttcttgaatga

SEQ ID NO: 150 - DNA, 353 bp, Homo sapien
aggcagcagatggcacgggtaggtgcgcgggcagcaaatgcttggcagtttaagtggtttccttgcaaaggacgaggctggggagcacgccactgagagaaaggcatcgactcctgcaaagcctgcttccgaagcgagcaacgtggacttgtttgcacagaatgggaaataggtccaagtgcggtgaggagtactttaaagaagggatttcacaagcggtgctggcacaggccactgcagcttgtttactgccacggagatggaatttcatactttcaaaaggaacaatctgggatctctcaataaaacttccagggcacaggcaaggaaaacaaaaatagacaaatgggacc

SEQ ID NO: 151 - DNA, 353 bp, Homo sapien; identical to SEQ ID NO: 150

SEQ ID NO: 152 - DNA, 503 bp, Homo sapien
aagtctctcttcgtcttagctaaatggtcttttcattctctttccaaacaagacttggattttctcacctccgtctttattcttcctgtcccccacactggaatgccctccctttcttcttgggctgccctttttctattcagtttccaaggccaggcttaagtcctacttcctgtttgaggccttctctgctgactcttacccacagtgaccttccaggtcactcctagagtaattattgtctctatcagtcattgggcacttttattgtcttttaacattacttctactgttatcttgaattgttatttaactattcatgtatgtttgtcttgagttcccacctataaaccccttgagttactgcgatagaaaggaaagagcatagaacagaaaatcagaagacccaagtctgagctctgattcagaaaatggggctcaggtgtgtcatcttggatgagtcacctcacgactctctgaaccacaatttcatcatctgtaaa

SEQ ID NO: 153 - DNA, 1136 bp, Homo sapien
agagaagaggaaagtcgcaggctctccgatcccagggctcattatataccattataccaagccaactcaattctaggccttcccttctccgcaagctccacctctacatcttcaattgcctactagacagtttgcacttggaccttccattgttacttccaccccaaggtgtcaaaagcaaaactccctgaaccagtttttctacctgtcttgctaatttctgttcatggcgtctgtctttcttcaagtcagctaggcttgaaaactctcaggcaagttcaactcttgcctctccctatttcacaggttctgacatttctttcttcatcttgccaattacaattggccttccttttagtctcagcaccaccattttaatactggcttttgtcaccttatcccttactgtcataggctcctaacgtagtctttccttatctccagtctcttcccatcgaaaggcatcctctacaatgcatattgccagattagtctacccacacactgctttcagagtttcactgtcttactctaaattttttcatggttcactattgtccacaagacaagtcaaaatcctttcgtcagaagttcaagagggtctttgaatcttactttccattattccccagtaaaagtctctcttctctagctaaattggtcttttcattctctttccaaacaagacttggattttctcacctccgtctttattcttcctgtcccccacactggaatgccctccctttcttcttgggctgccctttttctattcagtttccaaggccaggcttaagtcctacttcctgtttgaggccttctctgctgactcttacccacagtgaccttccaggtcactcctagagtaattattgtctctatcagtcattgggcacttttattgtcttttaacattacttctactgttatcttgaattgttatttaactattcatgtactgtttgtcttgagttcccacctataaaccccttgagttactgcgatagaaaggaaagagcatagaacagaaaatcagaagacccaagtctgagctctgattcagaaaatggggctcaggtgtgtcatcttggatgagtcactcagactctctgaaccacaatttcatcatctgtaaa

SEQ ID NO: 154 - DNA, 463 bp, Homo sapien
ttggattttctcaccatccgtctttatgtcttcctgtccctccacagctggaatgccgctgccctttcttcttgggctgccctttttctattcagtttaccaaggccagggcttaagtcctgacttccatgctttgagagccttgctgctgctgagctctgatcccactagtgaccttccaggtcactcctagagtaatttattgtctctatctagtgcattgggcactttttattgtgctgtttaacattacttctactgttatcttgaattgttatttgaactattgcatgtacccgtttcgtcttgtagttcctcacctataaaccccttgagttactgcgatagaaaggaaagagcatagaacagaaaatcagaagacccaagtctgagctctgattcagaaaatggggctcaggtgtgtcatcttggatgagtcacccacactctctgaaccacaatt

SEQ ID NO: 155 - DNA, 443 bp, Homo sapien
gcacagtagggaatgtgctagttttgtgagggtattggtgctaggaggtgatgacttggcacttcagaaggtaggcaggcttagaatcaagcttcaggagtcacttgggaccttatgataaggtcagtgcaggaagccacagaacacacggtcaatttcatactagaactgtttgagtcgggctctgcacagcttcagaggcttgcccacagctgagagtgcccagcatgcagctaccacttcctttcagcccttccctccaggcaagaaggcttggctcccaggaggtatgggattagggtaaggagtactgactttaagtggcgatttctaacttaaaggctcataaaaggatagagttccttatttccctattccgattattgtttgaaaaaggggtgagggtacaagtctccaccagggagacagactgtgatacatca

SEQ ID NO: 156 - DNA, 443 bp, Homo sapien
gcacagtagggaatgtgctagttttgtgagggtattggtgctaggaggtgatgacttggcacttcagaaggtaggcaggcttagaatcaagcttcaggagtcacttgggaccttatgataaggtcagtgcaggaagccacagaacacacggtcaatttcatactagaactgtttgagtcgggctctgcacagcttcagaggcttgcccacagctgagagtgcccagcatgcagctaccacttcctttcagcccttccctccaggcaagaaggcttggctcccaggaggtatgggattagggtaaggagtactgactttaagtggcgatttctaacttaaaggctcataaaaggatagagttccttatttccctattccgattattgtttgaaaaaggggtgagggtaaaagtctccaccagggagacagactgtgatacatca

SEQ ID NO: 157 - DNA, 679 bp, Homo sapien
cgcgtccggcataagccaccgctcctggcctctactagctgacatctaatagtggtatcatcttacagagtctagaatgttttgagacaatcttacatttaaaaactataccttacgaaataccagaaaaagggatcatactgatgcagctaggaaatcaataacaggttattcaatactgcttcatcagccattctcataaaacacgatgagctcccctatagggttgctgagatccggaaatagggagttcccaaactgcttgggctgtactctctattcagtagtactttttaccacagcagtcatctgtctatttatattaatgagactgttgtccttatcatttaatctccagctatatcacagctgtcagctgtgggaacacctttgccaagggaaagcctctaaatactaaaatgtttgcagcactaggttaacaaccaagaggggagatcaaactccaggaacatgcagtgtgcttgcaatttcagtaaggtaacagaaggtaaaccagggcctgtatgatccacatggggtgagtgggaagaaaaatgaccccaaggcaaaatcaattatataaggcctgaaaattctttacaccctttaaaaatttataatattgtttctatacatatatccaatgtacatacaataaatctttaatgtttggttccaa

SEQ ID NO: 158 - DNA, 1105 bp, Homo sapien
gcttagtttgaaaaatgtgaaggactttcgtaacggaagtaatcaagatcaagagtaattccaacttaatgttttgcatggacttgagttaagatattttttaaatcctgaggactagcattaattgacagctgacccaggtgctacacagaagtggattcagtgaatctaggaagacagcagcagacaggattccaggaaccagtgtttgatgaagctaggactgaggagcaagcgagcaagcagcagttcgtggtgaagataggaaaagagtccaggagccagtgcgatttggtgaaggaagctaggaagaaggaaggagcgctaacgatttggtggtgaagctaggaaaaaggattccaggaaggagcgagtgcaatttggtgatgaaggtgatccgcccgccttggccttctgaagtgctgggattacaggcataagccaccgctcctggcctctactagctgacatctaatagtggtatcatcttacagagtctagaatgttttgagacaatcttacatttaaaaactataccttacgaaataccagaaaaagggatcatactgatgcagctaggaaatcaataacaggttattcaatactgcttcatcagccattctcataaaacacgatgagctcccctatagggttgctgagatccggaaatagggagttcccaaactgcttgggctgtactctctattcagtagtactttttaccacagcagtcatctgtctatttatattaatgagactgttgtccttatcatttaatctccagctatatcacagctgtcagctgtgggaacacctttgccaagggaaagcctctaaatactaaaatgtttgcagcactaggttaacaaccaagaggggagatcaaactccaggaacatgcagtgtgcttgcaatttcagtaaggtaacagaaggtaaaccagggcctgtatgatccacatggggtgagtgggaagaaaaatgaccccaaggcaaaatcaattatataaggcctgaaaattctttacaccctttaaaaatttataatattgtttctatacatatatccaatgtacatacaataaatctttaatgtttggttccaa

SEQ ID NO: 159 - DNA, 683 bp, Homo sapien
ggattacaggcataagccaccgctcctggcctctactagctgacatctaatagtggtatcatcttacagagtctagaatgttttgagacaatcttacatttaaaaactataccttacgaaataccagaaaaagggatcatactgatgcagctaggaaatcaataacaggttattcaatactgcttcatcagccattctcataaaacacgatgagctcccctatagggttgctgagatccggaaatagggagttcccaaactgcttgggctgtactctctattcagtagtactttttaccacagcagtcatctgtctatttatattaatgagactgttgtccttatcatttaatctccagctatatcacagctgtcagctgtgggaacacctttgccaagggaaagcctctaaatactaaaatgtttgcagcactaggttaacaaccaagaggggagatcaaactccaggaacatgcagtgtgcttgcaatttcagtaaggtaacagaaggtaaaccagggcctgtatgatccacatggggtgagtgggaagaaaaatgaccccaaggcaaaatcaattatataaggcctgaaaattctttacaccctttaaaaatttataatattgtttctatacatatatccaatgtacatacaataaatctttaatgtttggttccatgag

SEQ ID NO: 160 - DNA, 868 bp, Homo sapien
cgcgccccgacgtcactccgtctcgccctgccccggcggggggtcaggatcctccacaggtaggcgcagtcagctggagcgtcgcggcggtccgccggtcgtggagggcgtgtcctgcggcgcgatggccgtagtgttgccggcggttgtggaggagctcctgagcgagatggcggcggcggtgcaggagagcgcgcgaattcctgatgaatatctgttatcgctgaagtttctctttggctcatcagccacccaggccttggacctagttgatcgacagtccatcaccttaatctcatcacccagtggaaggcgtgtttaccaggtccttggaagttccagtaaaacatacacatgtttggcttcttgtcattactgttcatgtcctgcatttgcattctcagtgctacggaagagtgacagcatcctgtgcaagcatctcttggcagtttacctgagtcaggttatgaggacctgtcagcagctaagtgtctctgacaagcagttgactgacatattattgatggagaagaaacaagaagcataaaaggtacagattgagcatcattctttcaaaatagaatcctgtcaagaaatgcattgaaagcgtcatgattcacatggaaaagaggtgaaatggatcttcagacacttcatgttactgtcccttttccctccaggactgcaggaggtgctgtgggttggagccgtgggctgtggagggtttgtgtatgatgagaagccctgtacagtcttgtcaagaaataccctgagccagtctctgagacgcttcggtaaaaaatgtccctggatggaatcaagattttaaattcaaataaagcctaatatcatgttgtgtccaaaaaaa

SEQ ID NO: 161 - DNA, 1066 bp, Homo sapien
ctcatacgagcactatagggaatttgcccctcgagcacgagattcggcacgagggatcctccacaggtaggcgcagtcagctggagcgtcgcggcggtccgccggtcggtggagggcgtgtcctgcggcgcgatggccgtagtgttgccggcggttgtggaggagctcctgagcgagatggcggcggcggtgcaggagagcgcgcgaattcctgatgaatatctgttatcgctgaagtttctctttggctcatcagccacccaggccttggacctagttgatcgacagtccatcaccttaatctcatcacccagtggaaggcgtgtttaccaggtccttggaagttccagtaaaacatacacatgtttggcttcttgtcattactgttcatgtcctgcatttgcattctcagtgctacggaagagtgacagcatcctgtgcaagcatctcttggcagtttacctgagtcaggttatgaggacctgtcagcagctaagtgtctctgacaagcagttgactgacatattattgatggagaagaaacaagaagcataaaaggtacagattgagcatcattctttcaaaatagaatcctgtcaagaaatgcattgaaagcgtcatgattcacatggaaaagaggtgaaatggatcttcagacacttcatgttactgtcccttttccctccaggactgcaggaggtgctgtgggttggagccgtgggctgtggagggtttgtgtatgatgagaagccctgtacagtcttgtcaagaaataccctgagccagtctctgagacgcttcggtaaaaaatgtccctggatggaatcaagattttaaattcaaataaagcctaatatcatgttgtgtccaaaaaaaaaaaaaaaaaaaggggggggccaaaatacccgggggccagttacccgcccagtttggtcagggccccagagggggtaaagaagggggcggggtaacaaccgggggacacgccgggctggggacccccgggggcagggacccaccgaaggcggcaaaagtgtggagcgcgccggggcgtcgttataacagc

SEQ ID NO: 162 - DNA, 668 bp, Homo sapien
cgacgtcactccgtctcgccctgccccggcggggggtcaggatcctccacaggtaggcgcagtcagctggagcgtcgcggcggtccgccggtcgtggagggcgtgtcctgcggcgcgatggccgtagtgttgccggcggttgtggaggagctcctgagcgagatggcggcggcggtgcaggagagcgcgcgaagtacgggaccgaggtcttcctgatgaatatctgttatcgctgaagtttctctttggctcatcagccacccaggccttggacctagttgatcgacagtccatcaccttaatctcatcacccagtggaaggcgtgtttaccaggtccttggaagttccagtaaaacatacacatgtttggcttcttgtcattactgttcatgtcctgcatttgcattctcagtgctacggaagagtgacagcatcctgtgcaagcatctcttggcagtttacctgagtcaggttatgaggacctgtcagcagctaagtgtctctgacaagcagttgactgacatattattgatggagaagaaacaagaagcataaaaggactgcaggaggtgctgtgggttggagccgtgggctgtggagggtttgtgtatgatgagaagccctgtacagtcttctcaagaaataccctgagccagtctctgagacg

SEQ ID NO: 163 - DNA, 846 bp, Homo sapien
cgtcgcggcggtccgccggtcgtggagggcgtgtcctgcggcgcgatggccgtagtgttgccggcggttgtggaggagctcctgagcgagatggcggcggcggtgcaggagagcgcgcgaagtacgggaccgagttcctgatgaatatctgttatcgctgaagtttctctttggctcatcagccacccaggccttggacctagttgatcgacagtccatcaccttaatctcatcacccagtggaaggcgtgtttaccaggtccttggaagttccagtaaaacatacacatgtttggcttcttgtcattactgttcatgtcctgcatttgcattctcagtgctacggaagagtgacagcatcctgtgcaagcatctcttggcagtttacctgagtcaggttatgaggacctgtcagcagctaagtgtctctgacaagcagttgactgacatattattgatggagaagaaacaagaagcataaaaggactgcaggaggtgctgtgggttggagccgtgggctgtggagggtttgtgtatgatgagaagccctgtacagtcttctcaagaaataccctgagccagtctctgagacgcttcgatggagtctcactttgttcgcccagggctgggggtgcagtggcgtgatctcagctcactgcaagctccgctcccgggttcacgccattctcctggcctcagcctcccgagtagctgggactacacggcacttgaggaccgacctaaattctgtctcggaaggaactcacgggtcccccggggtttccgccggagaaaaagccacttatgccaggggtttaagggggcctacaccttggtgcgcgaaaa

SEQ ID NO: 164 - DNA, 938 bp, Homo sapien
gtagatgagagattccccccgccctgtcctgtcttatgacagtcagcccatagagtgggccccatgaatcactaggcgtaggaacagaatggtttatgtggttggttgaactaatgctgaaactcttcagttcctttatatgctgtcctaaaggtgagcactgagaggtgaggaagggagagtctgtacactggaggaagagaagttgtttcctcttttatgtaaaacattactgcagttcttctcggtgcaatttgcagagcaactctgagtctacataaataaaaagggaaagaggtggtttttccagcacatctgaggtctgatcccatctatcctttctttgtaggtccttggaagttccagtaaaacatacacatgtttggcttcttgtcattactgttcatgtcctgcatttgcattctcagtgctacggaagagtgacagcatcctgtgcaagcatctcttggcagtttacctgagtcaggttatgaggacctgtcagcagctaagtgtctctgacaagcagttgactgacatattattgatggagaagaaacaagaagcataaaaggtacagattgagcatcattctttcaaaatagaatcctgtcaagaaaatgcattgaaagcgtcatgaaatcacatggaaaagaggtgaaatggatcttcagacacttcatgttactgtcccttttccctccaggactgcaggaggtgctgtgggttggagccgtgggctgtggagggtttgtgtatgatgagaagccctgtacagtcttctcaagaaataacctgagccagtctctgagacgcttcggtaaaaaatgtccctggatggaatcaagacttttaaagttcaaataaagcctaaatatcaatgttgtgtccacaataatttagtcttttttttttttcttaacgagctctgcagcaca

SEQ ID NO: 165 - DNA, 1582 bp, Homo sapien
taagtaatgttactagagatggggtttcaccatgttgcccagactggtcttgaaatcctgacctcaggtggatccggcccacctcagccgtcccatgtgctgagattaccggcgtgagaccactgttgcctggcccatgattccgtttaagtacaggcatcaagcacaagggcccaacacgtatgactgtgggtgacaaccttcattgtatgtattgttgagacggagtctcactctgtcgcccaggctggagtgcagtggcgcgatcttggctcactgcaagcgtccgcctcctgggttcacgccattcatcctgcctcagccatcaccagagtagctgggacatacaggtgcctgccaccatgtccgactaattttgtgttgctatttattagtagagatggggtttcaccgtgttagacaggatggtctcgaactcctgaccttgtgatccgcccgcctcggcctcccaaagtgctgggattacaggctttgagccaccacacccggcctgagacttatcttactcctgccctgctactgaccctttgcctgtttttactctctctttaggtatgtaggaagctttagaaatttatacacctgctgtgaaataccaaaggttaagaacccccacaataaaatgtagatgagagattccccccgccctgtcctgtcttatgacagtcagcccatagagtgggccccatgaatcactaggcgtaggaacagaatggtttatgtggttggttgaactaatctgaaactcttcagttcctttatatgctgtcctaaaggtgagcactgagaggtgaggaagagagagtctgtacactggaggaagagaagttgtttcctcttttatgtaaaacattactgcagttcttctcagtgcaatttgcagagcaactctgagtctacataaataaaaagggaaagaggtggtttttccagcacatctgaggtctgatcccatctatcctttctttgtaggtccttggaagttccagtaaaacatacacatgtttggcttcttgtcattactgttcatgtcctgcatttgcattctcagtgctacggaagagtgacagcatcctgtgcaagcatctcttggcagtttacctgagtcaggttatgaggacctgtcagcagctaagtgtctctgacaagcagttgactgacatattattgatggagaagaaacaagaagcataaaaggtacagattgagcatcattctttcaaaatagaatcctgtcaagaaaatgcattgaaagcgtcatgaaatcacatggaaaagaggtgaaatggatcttcagacacttcatgttactgtcccttttccctccaggactgcaggaggtgctgtgggttggagccgtgggctgtggagggtttgtgtatgatgagaagccctgtacagtcttctcaagaaataacctgagccagtctctgagacgcttcggtaaaaaatgtccctggatggaatcaagacttttaaagttcaaataaagcctaaatatcaatgttgtgtccacaataatttagtcttttttttttttcttaacgagctctgcagcaca

SEQ ID NO: 166 - DNA, 626 bp, Homo sapien
gagtgacagcatcctgttggtatagcattgtccaagaggccacattcgtaactgatgtgccctaagtgtatctcaactgcaagagacaggattgaaccaaaaccccttcaagatctaaagctgtgttctctgacatcagattcaacgcaatcatctccccagagtgcaagcatctcttggcagtttacctgagtcaggttatgaggacctgtcagcagctaagtgtctctgacaagcagttgactgacatattattgatggagaagaaacaagaagcaaaaaaggtacagattgagcatcattctttcaaaatagaatcctgtcaagaaatgcattgaaagcgtcatgattcacatggaaaagaggtgaaatggatcttcagacacttcatgttactgtcccttttccctccaggactgcaggaggtgctgtgggttggagccgtgggctgtggagggtttgtgtatgatgagaagccctgtacagtcttctcaagaaataccctgagccagtctctgagacgcttcggtaaaaaatgtccctggatggaatcaagattttaaattcaaataaagcctaatatcatgttgtgtccaaaaaaaaagtcgacgcggccgcgaatttag

SEQ ID NO: 167 - DNA, 679 bp, Homo sapien
caggtaggcgcagtcagctggagcgtcgcgggcggtccgccggtcgtggagggcgtgtcctgcggcgcgatggccgtagtgttgccggcggttgtggaggagctcctgagcgagatggcggcggcggtgcaggagagcgcgcgaattcctgatgaatatctgttatcgctgaagtttctctttggctcatcagccacccaggccttggacctagttgatcgacagtccatcaccttaatctcatcacccagtggaaggcgtgtttaccaggtccttggaagttccagtaaaacatacacatgtttggcttcttgtcattactgttcatgtcctgcatttgcattctcagtgctacggaagagtgacagcatcctgtgcaagcatctcttggcagtttacctgagtcaggttatgaggacctgtcagcagctaagtgtctctgacaagcagttgactgacatattattgatggagaagaaacaagaagcataaaaggactgcaggaggtgctgtgggttggagccgtgggctgtggagggtttgtgtatgatgagaagccctgtacagtcttgtcaagaaataccctgagccagtctctgagacgcttcggtaaaaaatgtccctggatggaatcaagattttaaattcaaataaagcctaatatcatgttgtgtccaca

SEQ ID NO: 168 - DNA, 720 bp, Homo sapien
gaacgaggccggcggggggtcaggatcctccacaggtaggcgcagtcagctggagcgtcgcgggcggtccgccggtcgtggagggcgtgtcctgcggcgcgatggccgtagtgttgccggcggttgtggaggagctcctgagcgagatggcggcggcggtgcaggagagcgcgcgaattcctgatgaatatctgttatcgctgaagtttctctttggctcatcagccacccaggccttggacctagttgatcgacagtccatcaccttaatctcatcacccagtggaaggcgtgtttaccaggtccttggaagttccagtaaaacatacacatgtttggcttcttgtcattactgttcatgtcctgcatttgcattctcagtgctacggaagagtgacagcatcctgtgcaagcatctcttggcagtttacctgagtcaggttatgaggacctgtcagcagctaagtgtctctgacaagcagttgactgacatattattgatggagaagaaacaagaagcataaaaggactgcaggaggtgctgtgggttggagccgtgggctgtggagggtttgtgtatgatgagaagccctgtacagtcttgtcaagaaataccctgagccagtctctgagacgcttcggtaaaaaatgtccctggatggaatcaagattttaaattcaaataaagcctaatatcatgttgtgtccacaaaaaaaaaa

SEQ ID NO: 169 - DNA, 585 bp, Homo sapien
ctttgagaaggaaaaaaagggaatcccagaagtgggcactggggaattagatggccccataaaaatatgaactaaattcgatgttgacaactttgcatatcctactttcagccatgtggtatatctttgcactacctgtgagacagcctgacgccacacttgaccttcacatggggcatgagtaccttcacctattcctttaagccttgccaatttcatcagagtccagaccatgaagcagaaacaggacatactcacacacaccttattccaaaggaaaaaacactaccttcctgaaagcaggcagctattttctaagtcttgcgaaagaagaaaataatgatgtccactccattctttccctttcttttacactgttaacttcttaaacatcttgggacctggctggcaagttgggtatagcattgtccaagaggccacattcgtaactgatgtgccctaagtgtatctcaactgcaagagacaggattgaaccaaaaccccttcaagatctaaagctgtgttctctgacatcagattcaacgcaatcatctccccagaggtgtgtacaggccaatatatgca

SEQ ID NO: 170 - DNA, 1103 bp, Homo sapien
catgcatcagccactgcgcctgaccctatttagtcttaagtaactaactgaattactagtaatttttaaaaggttggaatggtgggccaaacagtaagatgaagtttcgacgagtaggtcagttcttttccttgggtccaggaaactattgagcagcaacagaagatcagagcagagatgtggctaaacagtagcaggtatgaaaagacttagaggttctggtttctgtaagcttcaaatatctgtgatgcttgtgccaaaacagcttaagtagactgtattgtttgagagttagtatcgagaacaagggaagaactggtttcactctgcacttctgatctttacaacagggcaattgaaggaacagactaaaaatcgtgtcctggaaggaaactacaggtactaccagggattttcagtctgaagaagaaaagacaaaatagatgacagaaggagtattagaagggagagcgatgagactcagttggacaccgagagagcaaagaagcaataatacgtgaagatgaaaatgaaatcaatttcagcataagaagacaagaacttatggtaaagctgcccacagccagaagaggatcctagaaggacaggaattccctgtctgcagcatttcataagcatgtaatattgttgcagggatactgcagaaggagttgaagcagtggacagacagatgatataggtgattttacagcctaagaaagccctgtgcttgtgcccccaaaacatgaggtgctagtgaatgaatgctgggggaaagcccagggcctaggtgttgcaatgttctgtggttggcagatgctttttgttttgttaaaaagtgcaacagataaaatttatcaatacttttctgctactcaggaaacttggactcagcataacttactttttttccagcagccttcagggtaaagtttagaaggtagatgcaacaagccaatgcagcaccctaagcttgtctttttaagttttatttttatttaacctaatatacacagagttaaataattttacttcataaaattttcacactttgagttccaagaacttaaccaaacttgaaatttggagagaagcaaaattcc

SEQ ID NO: 171 - DNA, 858 bp, Homo sapien
cgcgccccgacgtcactccgtctcgccctgccccggcggggggtcaggatcctccacaggtaggcgcagtcagctggagcgtcgcggcggtccgccggtcgtggagggcgtgtcctgcggcgcgatggccgtagtgttgccggcggttgtggaggagctcctgagcgagatggcggcggcggtgcaggagagcgcgcgaattcctgatgaatatctgttatcgctgaagtttctctttggctcatcagccacccaggccttggacctagttgatcgacagtccatcaccttaatctcatcacccagtggaaggcgtgtttaccaggtccttggaagttccagtaaaacatacacatgtttggcttcttgtcattactgttcatgtcctgcatttgcattctcagtgctacggaagagtgacagcatcctgtgcaagcatctcttggcagtttacctgagtcaggttatgaggacctgtcagcagctaagtgtctctgacaagcagttgactgacatattattgatggagaagaaacaagaagcataaaaggtacagattgagcatcattctttcaaaatagaatcctgtcaagaaatgcattgaaagcgtcatgattcacatggaaaagaggtgaaatggatcttcagacacttcatgttactgtcccttttccctccaggactgcaggaggtgctgtgggttggagccgtgggctgtggagggtttgtgtatgatgagaagccctgtacagtcttgtcaagaaataccctgagccagtctctgagacgcttcggtaaaaaatgtccctggatggaatcaagattttaaattcaaataaagcctaatatcatgttgtg

SEQ ID NO: 172 - DNA, 2128 bp, Homo sapien
cgcgccccgacgtcactccgtctcgccctgccccggcggggggtcaggatcctccacaggtaggcgcagtcagctggagcgtcgcggcggtccgccggtcgtggagggcgtgtcctgcggcgcgatggccgtagtgttgccggcggttgtggaggagctcctgagcgagatggcggcggcggtgcaggagagcgcgcgaattcctgatgaatatctgttatcgctgaagtttctctttggctcatcagccacccaggccttggacctagttgatcgacagtccatcaccttaatctcatcacccagtggaaggcgtgtttaccaggtccttggaagttccagtaaaacatacacatgtttggcttcttgtcattactgttcatgtcctgcatttgcattctcagtgctacggaagagtgacagcatcctgtgcaagcatctcttggcagtttacctgagtcaggttatgaggacctgtcagcagctaagtgtctctgacaagcagttgactgacatattattgatggagaagaaacaagaagcataaaaggactgcaggaggtgctgtgggttggagccgtgggctgtggagggtttgtgtatgatgagaagccctgtacagtcttgtcaagaaataccctgagccagtctctgagacgcttcggtaaaaaatgtccctggatggaatcaagattttaaattcaaataaagcctaatatcatgttgtgtccacattaaaaaaaaagtctttttttttttcttttgagatggagtctcactttgtcgcccaggctggggtgcagtggcgtgatctcagctcactgcaagctccgctcccgggttcacgccattctcctggcctcagcctcccgagtagctgggactacaggtacccgccaccatgcccggctaaatttttgtattttttttttagtagagatggggtttcaccgtgttagccaggatggtctccatctcctgacctagtggtctgcccgcctcgacctcccaaagtgctggaattacatgcatgagccactgcgcctgaccctatttagtcttaagtaactaactgaattactagtaatttttaaaaggttggaatggtgggccaaacagtaagatgaagtttcgacgagtaggtcagttcttttccttgggtccaggaaactattgagcagcaacagaagatcagagcagagatgtggctaaacagtagcaggtatgaaaagacttagaggttctggtttctgtaagcttcaaatatctgtgatgcttgtgccaaaacagcttaagtagactgtattgtttgagagttagtatcgagaacaagggaagaactggtttcactctgcacttctgatctttacaacagggcaattgaaggaacagactaaaaatcgtgtcctggaaggaaactacaggtactaccagggattttcagtctgaagaagaaaagacaaaatagatgacagaaggagtattagaagggagagcgatgagactcagttggacaccgagagagcaaagaagcaataatacgtgaagatgaaaatgaaatcaatttcagcataagaagacaagaacttatggtaaagctgcccacagccagaagaggatcctagaaggacaggaattccctgtctgcagcatttcataagcatgtaatattgttgcagggatactgcagaaggagttgaagcagtggacagacagatgatataggtgattttacagcctaagaaagccctgtgcttgtgcccccaaaacatgaggtgctagtgaatgaatgctgggggaaagcccagggcctaggtgttgcaatgttctgtggttggcagatgctttttgttttgttaaaaagtgcaacagataaaatttatcaatacttttctgctactcaggaaacttggactcagcataacttactttttttccagcagccttcagggtaaagtttagaaggtagatgcaacaagccaatgcagcaccctaagcttgtctttttaagttttatttttatttaacctaatatacacagagttaaataattttacttcataaaattttcacactttgagttccaagaacttaaccaaacttgaaatttggagagaagcaaaattcc

SEQ ID NO: 173 - DNA, 2030 bp, Homo sapien
cgcgccccgacgtcactccgtctcgccctgccccggcggggggtcaggatcctccacaggtaggcgcagtcagctggagcgtcgcggcggtccgccggtcgtggagggcgtgtcctgcggcgcgatggccgtagtgttgccggcggttgtggaggagctcctgagcgagatggcggcggcggtgcaggagagcgcgcgaattcctgatgaatatctgttatcgctgaagtttctctttggctcatcagccacccaggccttggacctagttgatcgacagtccatcaccttaatctcatcacccagtggaaggcgtgtttaccaggtccttggaagttccagtaaaacatacacatgtttggcttcttgtcattactgttcatgtcctgcatttgcattctcagtgctacggaagagtgacagcatcctgtgcaagcatctcttggcagtttacctgagtcaggttatgaggacctgtcagcagctaagtgtctctgacaagcagttgactgacatattattgatggagaagaaacaagaagcataaaaggactgcaggaggtgctgtgggttggagccgtgggctgtggagggtttgtgtatgatgagaagccctgtacagtcttgtcaagaaataccctgagccagtctctgagacgcttcggtaaaatggagtctcactttgtcgcccaggctggggtgcagtggcgtgatctcagctcactgcaagctccgctcccgggttcacgccattctcctggcctcagcctcccgagtagctgggactacaggtacccgccaccatgcccggctaaatttttgtattttttttttagtagagatggggtttcaccgtgttagccaggatggtctccatctcctgacctagtggtctgcccgcctcgacctcccaaagtgctggaattacatgcatgagccactgcgcctgaccctatttagtcttaagtaactaactgaattactagtaatttttaaaaggttggaatggtgggccaaacagtaagatgaagtttcgacgagtaggtcagttcttttccttgggtccaggaaactattgagcagcaacagaagatcagagcagagatgtggctaaacagtagcaggtatgaaaagacttagaggttctggtttctgtaagcttcaaatatctgtgatgcttgtgccaaaacagcttaagtagactgtattgtttgagagttagtatcgagaacaagggaagaactggtttcactctgcacttctgatctttacaacagggcaattgaaggaacagactaaaaatcgtgtcctggaaggaaactacaggtactaccagggattttcagtctgaagaagaaaagacaaaatagatgacagaaggagtattagaagggagagcgatgagactcagttggacaccgagagagcaaagaagcaataatacgtgaagatgaaaatgaaatcaatttcagcataagaagacaagaacttatggtaaagctgcccacagccagaagaggatcctagaaggacaggaattccctgtctgcagcatttcataagcatgtaatattgttgcagggatactgcagaaggagttgaagcagtggacagacagatgatataggtgattttacagcctaagaaagccctgtgcttgtgcccccaaaacatgaggtgctagtgaatgaatgctgggggaaagcccagggcctaggtgttgcaatgttctgtggttggcagatgctttttgttttgttaaaaagtgcaacagataaaatttatcaatacttttctgctactcaggaaacttggactcagcataacttactttttttccagcagccttcagggtaaagtttagaaggtagatgcaacaagccaatgcagcaccctaagcttgtctttttaagttttatttttatttaacctaatatacacagagttaaataattttacttcataaaattttcacactttgagttccaagaacttaaccaaacttgaaatttggagagaagcaaaattcc

SEQ ID NO: 174 - DNA, 3129 bp, Homo sapien
tctatttcctttttcctttgttgtctggtaacccttggctgtctagtcatatttcagagtggaagactaaaaagtatattggaagctctgggtggtagaggggcttacggaatatgaacgtcactatagttgttctcagtaggctatttagttggggaaaccatttcagtgtcattcccacttctcttggggtatacctagggaagacttccagtctcctggctgaagtgtgaaggcctgattgcttgtgttatgggagccatgttagggaagagagcaggagatcctgttttcagtgtgacaccctgactttcactgtacctagtatttttccctagtccaaatagcctgtgtttgaacctctccagaaaataaacctagtctcttgccagaatgagggaaaggcagtcacctaaagctgtggagggaactggggtcccactacttctcaaacgtactcgaaaagagtcttattttcatatccctgtttcacccctaatgaagctatttggtgccaccaattcgttagggtttggggaaggggagaggtggattttggagtgtaactcaggctggtgcttgactctccccattgctggcctaggattcagttttcttaggtcttataaatcattttccactcttctatcagcttccaatgtatcatggctgttgtttctccctgtctttctcatcctttggaattcatacttttaaaaacaaatctggccgggcacggtggctcatgtctataatcccagcactttgggaggccaaggccagtggatcacttgaggtgaggagttcaagaccagcatggccagcatggtgaaaccccatctctactaaacataccaaaaaaaattagctgggcatggtagtgcatgcctgtagtcccagctacctgggaggctgaggcaagagaatggtttaaacccgggaggcggaggttgcagtgagctgagattgcaccattgcactccagcctgggtgacaggacaagactccgtctcaaaaaaagaaaaaggaaatccttttattatggttttagtggggtttggggaaggagtaaaaccagatgcataggttcagttgaccatcacacacggaagtgtttttagttacagtgttttttaagatttttatgtcaatggtcactgcttaatatgattaactttttttttccattctcattttacagttcctgatgaatatctgttatcgctgaagtttctctttggctcatcagccacccaggccttggacctagttgatcgacagtccatcaccttaatctcatcacccagtggaaggcgtgtttaccaggtccttggaagttccagtaaaacatacacatgtttggcttcttgtcattactgttcatgtcctgcatttgcattctcagtgctacggaagagtgacagcatcctgtgcaagcatctcttggcagtttacctgagtcaggttatgaggacctgtcagcagctaagtgtctctgacaagcagttgactgacatattattgatggagaagaaacaagaagcataaaaggactgcaggaggtgctgtgggttggagccgtgggctgtggagggtttgtgtatgatgagaagccctgtacagtcttgtcaagaaataccctgagccagtctctgagacgcttcggtaaaaaatgtccctggatggaatcaagattttaaattcaaataaagcctaatatcatgttgtgtccacattaaaaaaaaagtctttttttttttcttttgagatggagtctcactttgtcgcccaggctggggtgcagtggcgtgatctcagctcactgcaagctccgctcccgggttcacgccattctcctggcctcagcctcccgagtagctgggactacaggtacccgccaccatgcccggctaaatttttgtattttttttttagtagagatggggtttcaccgtgttagccaggatggtctccatctcctgacctagtggtctgcccgcctcgacctcccaaagtgctggaattacatgcatgagccactgcgcctgaccctatttagtcttaagtaactaactgaattactagtaatttttaaaaggttggaatggtgggccaaacagtaagatgaagtttcgacgagtaggtcagttcttttccttgggtccaggaaactattgagcagcaacagaagatcagagcagagatgtggctaaacagtagcaggtatgaaaagacttagaggttctggtttctgtaagcttcaaatatctgtgatgcttgtgccaaaacagcttaagtagactgtattgtttgagagttagtatcgagaacaagggaagaactggtttcactctgcacttctgatctttacaacagggcaattgaaggaacagactaaaaatcgtgtcctggaaggaaactacaggtactaccagggattttcagtctgaagaagaaaagacaaaatagatgacagaaggagtattagaagggagagcgatgagactcagttggacaccgagagagcaaagaagcaataatacgtgaagatgaaaatgaaatcaatttcagcataagaagacaagaacttatggtaaagctgcccacagccagaagaggatcctagaaggacaggaattccctgtctgcagcatttcataagcatgtaatattgttgcagggatactgcagaaggagttgaagcagtggacagacagatgatataggtgattttacagcctaagaaagccctgtgcttgtgcccccaaaacatgaggtgctagtgaatgaatgctgggggaaagcccagggcctaggtgttgcaatgttctgtggttggcagatgctttttgttttgttaaaaagtgcaacagataaaatttatcaatacttttctgctactcaggaaacttggactcagcataacttactttttttccagcagccttcagggtaaagtttagaaggtagatgcaacaagccaatgcagcaccctaagcttgtctttttaagttttatttttatttaacctaatatacacagagttaaataattttacttcataaaattttcacactttgagttccaagaacttaaccaaacttgaaatttggagagaagcaaaattcc

SEQ ID NO: 175 - DNA, 1384 bp, Homo sapien
cgcgccccgacgtcactccgtctcgccctgccccggcggggggtcaggatcctccacaggtaggcgcagtcagctggagcgtcgcggcggtccgccggtcgtggagggcgtgtcctgcggcgcgatggccgtagtgttgccggcggttgtggaggagctcctgagcgagatggcggcggcggtgcaggagagcgcgcgaattcctgatgaatatctgttatcgctgaagtttctctttggctcatcagccacccaggccttggacctagttgatcgacagtccatcaccttaatctcatcacccagtggaaggcgtgtttaccaggtccttggaagttccagtaaaacatacacatgtttggcttcttgtcattactgttcatgtcctgcatttgcattctcagtgctacggaagagtgacagcatcctgtgcaagcatctcttggcagtttacctgagtcaggttatgaggacctgtcagcagctaagtgtctctgacaagcagttgactgacatattattgatggagaagaaacaagaagcataaaaggtacagattgagcatcattctttcaaaatagaatcctgtcaagaaatgcattgaaagcgtcatgattcacatggaaaagagggcaattgaaggaacagactaaaaatcgtgtcctggaaggaaactacaggtactaccagggattttcagtctgaagaagaaaagacaaaatagatgacagaaggagtattagaagggagagcgatgagactcagttggacaccgagagagcaaagaagcaataatacgtgaagatgaaaatgaaatcaatttcagcataagaagacaagaacttatggtaaagctgcccacagccagaagaggatcctagaaggacaggaattccctgtctgcagcatttcataagcatgtaatattgttgcagggatactgcagaaggagttgaagcagtggacagacagatgatataggtgattttacagcctaagaaagccctgtgcttgtgcccccaaaacatgaggtgctagtgaatgaatgctgggggaaagcccagggcctaggtgttgcaatgttctgtggttggcagatgctttttgttttgttaaaaagtgcaacagataaaatttatcaatacttttctgctactcaggaaacttggactcagcataacttactttttttccagcagccttcagggtaaagtttagaaggtagatgcaacaagccaatgcagcaccctaagcttgtctttttaagttttatttttatttaacctaatatacacagagttaaataattttacttcataaaattttcacactttgagttccaagaacttaaccaaacttgaaatttggagagaagcaaaattcc

SEQ ID NO: 176 - DNA, 2368 bp, Homo sapien
cgcgccccgacgtcactccgtctcgccctgccccggcggggggtcaggatcctccacaggtaggcgcagtcagctggagcgtcgcggcggtccgccggtcgtggagggcgtgtcctgcggcgcgatggccgtagtgttgccggcggttgtggaggagctcctgagcgagatggcggcggcggtgcaggagagcgcgcgaattcctgatgaatatctgttatcacagtgtctcactctgtcactgaggctggagtacagtggcgcgatctcaactcactgcagcctctgcctcccaggttccagtgattctcctgcctcagcctcctgagtagctgggactacaggtggcacacaccgaggcaggtggatgatgaggtcaggagttccgcctgccttggcctcccaaggtgctgggattacaggcatgagccaccacacctggccttaaaaaaattcttaaaggctgaagtttctctttggctcatcagccacccaggccttggacctagttgatcgacagtccatcaccttaatctcatcacccagtggaaggcgtgtttaccaggtccttggaagttccagtaaaacatacacatgtttggcttcttgtcattactgttcatgtcctgcatttgcattctcagtgctacggaagagtgacagcatcctgtgcaagcatctcttggcagtttacctgagtcaggttatgaggacctgtcagcagctaagtgtctctgacaagcagttgactgacatattattgatggagaagaaacaagaagcataaaaggactgcaggaggtgctgtgggttggagccgtgggctgtggagggtttgtgtatgatgagaagccctgtacagtcttgtcaagaaataccctgagccagtctctgagacgcttcggtaaaaaatgtccctggatggaatcaagattttaaattcaaataaagcctaatatcatgttgtgtccacattaaaaaaaaagtctttttttttttcttttgagatggagtctcactttgtcgcccaggctggggtgcagtggcgtgatctcagctcactgcaagctccgctcccgggttcacgccattctcctggcctcagcctcccgagtagctgggactacaggtacccgccaccatgcccggctaaatttttgtattttttttttagtagagatggggtttcaccgtgttagccaggatggtctccatctcctgacctagtggtctgcccgcctcgacctcccaaagtgctggaattacatgcatgagccactgcgcctgaccctatttagtcttaagtaactaactgaattactagtaatttttaaaaggttggaatggtgggccaaacagtaagatgaagtttcgacgagtaggtcagttcttttccttgggtccaggaaactattgagcagcaacagaagatcagagcagagatgtggctaaacagtagcaggtatgaaaagacttagaggttctggtttctgtaagcttcaaatatctgtgatgcttgtgccaaaacagcttaagtagactgtattgtttgagagttagtatcgagaacaagggaagaactggtttcactctgcacttctgatctttacaacagggcaattgaaggaacagactaaaaatcgtgtcctggaaggaaactacaggtactaccagggattttcagtctgaagaagaaaagacaaaatagatgacagaaggagtattagaagggagagcgatgagactcagttggacaccgagagagcaaagaagcaataatacgtgaagatgaaaatgaaatcaatttcagcataagaagacaagaacttatggtaaagctgcccacagccagaagaggatcctagaaggacaggaattccctgtctgcagcatttcataagcatgtaatattgttgcagggatactgcagaaggagttgaagcagtggacagacagatgatataggtgattttacagcctaagaaagccctgtgcttgtgcccccaaaacatgaggtgctagtgaatgaatgctgggggaaagcccagggcctaggtgttgcaatgttctgtggttggcagatgctttttgttttgttaaaaagtgcaacagataaaatttatcaatacttttctgctactcaggaaacttggactcagcataacttactttttttccagcagccttcagggtaaagtttagaaggtagatgcaacaagccaatgcagcaccctaagcttgtctttttaagttttatttttatttaacctaatatacacagagttaaataattttacttcataaaattttcacactttgagttccaagaacttaaccaaacttgaaatttggagagaagcaaaattcc

SEQ ID NO: 177 - DNA, 3259 bp, Homo sapien
tctatttcctttttcctttgttgtctggtaacccttggctgtctagtcatatttcagagtggaagactaaaaagtatattggaagctctgggtggtagaggggcttacggaatatgaacgtcactatagttgttctcagtaggctatttagttggggaaaccatttcagtgtcattcccacttctcttggggtatacctagggaagacttccagtctcctggctgaagtgtgaaggcctgattgcttgtgttatgggagccatgttagggaagagagcaggagatcctgttttcagtgtgacaccctgactttcactgtacctagtatttttccctagtccaaatagcctgtgtttgaacctctccagaaaataaacctagtctcttgccagaatgagggaaaggcagtcacctaaagctgtggagggaactggggtcccactacttctcaaacgtactcgaaaagagtcttattttcatatccctgtttcacccctaatgaagctatttggtgccaccaattcgttagggtttggggaaggggagaggtggattttggagtgtaactcaggctggtgcttgactctccccattgctggcctaggattcagttttcttaggtcttataaatcattttccactcttctatcagcttccaatgtatcatggctgttgtttctccctgtctttctcatcctttggaattcatacttttaaaaacaaatctggccgggcacggtggctcatgtctataatcccagcactttgggaggccaaggccagtggatcacttgaggtgaggagttcaagaccagcatggccagcatggtgaaaccccatctctactaaacataccaaaaaaaattagctgggcatggtagtgcatgcctgtagtcccagctacctgggaggctgaggcaagagaatggtttaaacccgggaggcggaggttgcagtgagctgagattgcaccattgcactccagcctgggtgacaggacaagactccgtctcaaaaaaagaaaaaggaaatccttttattatggttttagtggggtttggggaaggagtaaaaccagatgcataggttcagttgaccatcacacacggaagtgtttttagttacagtgttttttaagatttttatgtcaatggtcactgcttaatatgattaactttttttttccattctcattttacagttcctgatgaatatctgttatcgctgaagtttctctttggctcatcagccacccaggccttggacctagttgatcgacagtccatcaccttaatctcatcacccagtggaaggcgtgtttaccaggtccttggaagttccagtaaaacatacacatgtttggcttcttgtcattactgttcatgtcctgcatttgcattctcagtgctacggaagagtgacagcatcctgtgcaagcatctcttggcagtttacctgagtcaggttatgaggacctgtcagcagctaagtgtctctgacaagcagttgactgacatattattgatggagaagaaacaagaagcataaaaggtacagattgagcatcattctttcaaaatagaatcctgtcaagaaatgcattgaaagcgtcatgattcacatggaaaagaggtgaaatggatcttcagacacttcatgttactgtcccttttccctccaggactgcaggaggtgctgtgggttggagccgtgggctgtggagggtttgtgtatgatgagaagccctgtacagtcttgtcaagaaataccctgagccagtctctgagacgcttcggtaaaaaatgtccctggatggaatcaagattttaaattcaaataaagcctaatatcatgttgtgtccacattaaaaaaaaagtctttttttttttcttttgagatggagtctcactttgtcgcccaggctggggtgcagtggcgtgatctcagctcactgcaagctccgctcccgggttcacgccattctcctggcctcagcctcccgagtagctgggactacaggtacccgccaccatgcccggctaaatttttgtattttttttttagtagagatggggtttcaccgtgttagccaggatggtctccatctcctgacctagtggtctgcccgcctcgacctcccaaagtgctggaattacatgcatgagccactgcgcctgaccctatttagtcttaagtaactaactgaattactagtaatttttaaaaggttggaatggtgggccaaacagtaagatgaagtttcgacgagtaggtcagttcttttccttgggtccaggaaactattgagcagcaacagaagatcagagcagagatgtggctaaacagtagcaggtatgaaaagacttagaggttctggtttctgtaagcttcaaatatctgtgatgcttgtgccaaaacagcttaagtagactgtattgtttgagagttagtatcgagaacaagggaagaactggtttcactctgcacttctgatctttacaacagggcaattgaaggaacagactaaaaatcgtgtcctggaaggaaactacaggtactaccagggattttcagtctgaagaagaaaagacaaaatagatgacagaaggagtattagaagggagagcgatgagactcagttggacaccgagagagcaaagaagcaataatacgtgaagatgaaaatgaaatcaatttcagcataagaagacaagaacttatggtaaagctgcccacagccagaagaggatcctagaaggacaggaattccctgtctgcagcatttcataagcatgtaatattgttgcagggatactgcagaaggagttgaagcagtggacagacagatgatataggtgattttacagcctaagaaagccctgtgcttgtgcccccaaaacatgaggtgctagtgaatgaatgctgggggaaagcccagggcctaggtgttgcaatgttctgtggttggcagatgctttttgttttgttaaaaagtgcaacagataaaatttatcaatacttttctgctactcaggaaacttggactcagcataacttactttttttccagcagccttcagggtaaagtttagaaggtagatgcaacaagccaatgcagcaccctaagcttgtctttttaagttttatttttatttaacctaatatacacagagttaaataattttacttcataaaattttcacactttgagttccaagaacttaaccaaacttgaaatttggagagaagcaaaattcc

SEQ ID NO: 178 - DNA, 1889 bp, Homo sapien
cgcgccccgacgtcactccgtctcgccctgccccggcggggggtcaggatcctccacagttcctgatgaatatctgttatcgctgaagtttctctttggctcatcagccacccaggccttggacctagttgatcgacagtccatcaccttaatctcatcacccagtggaaggcgtgtttaccaggtccttggaagttccagtaaaacatacacatgtttggcttcttgtcattactgttcatgtcctgcatttgcattctcagtgctacggaagagtgacagcatcctgtgcaagcatctcttggcagtttacctgagtcaggttatgaggacctgtcagcagctaagtgtctctgacaagcagttgactgacatattattgatggagaagaaacaagaagcataaaaggactgcaggaggtgctgtgggttggagccgtgggctgtggagggtttgtgtatgatgagaagccctgtacagtcttgtcaagaaataccctgagccagtctctgagacgcttcggtaaaatggagtctcactttgtcgcccaggctggggtgcagtggcgtgatctcagctcactgcaagctccgctcccgggttcacgccattctcctggcctcagcctcccgagtagctgggactacaggtacccgccaccatgcccggctaaatttttgtattttttttttagtagagatggggtttcaccgtgttagccaggatggtctccatctcctgacctagtggtctgcccgcctcgacctcccaaagtgctggaattacatgcatgagccactgcgcctgaccctatttagtcttaagtaactaactgaattactagtaatttttaaaaggttggaatggtgggccaaacagtaagatgaagtttcgacgagtaggtcagttcttttccttgggtccaggaaactattgagcagcaacagaagatcagagcagagatgtggctaaacagtagcaggtatgaaaagacttagaggttctggtttctgtaagcttcaaatatctgtgatgcttgtgccaaaacagcttaagtagactgtattgtttgagagttagtatcgagaacaagggaagaactggtttcactctgcacttctgatctttacaacagggcaattgaaggaacagactaaaaatcgtgtcctggaaggaaactacaggtactaccagggattttcagtctgaagaagaaaagacaaaatagatgacagaaggagtattagaagggagagcgatgagactcagttggacaccgagagagcaaagaagcaataatacgtgaagatgaaaatgaaatcaatttcagcataagaagacaagaacttatggtaaagctgcccacagccagaagaggatcctagaaggacaggaattccctgtctgcagcatttcataagcatgtaatattgttgcagggatactgcagaaggagttgaagcagtggacagacagatgatataggtgattttacagcctaagaaagccctgtgcttgtgcccccaaaacatgaggtgctagtgaatgaatgctgggggaaagcccagggcctaggtgttgcaatgttctgtggttggcagatgctttttgttttgttaaaaagtgcaacagataaaatttatcaatacttttctgctactcaggaaacttggactcagcataacttactttttttccagcagccttcagggtaaagtttagaaggtagatgcaacaagccaatgcagcaccctaagcttgtctttttaagttttatttttatttaacctaatatacacagagttaaataattttacttcataaaattttcacactttgagttccaagaacttaaccaaacttgaaatttggagagaagcaaaattcc

SEQ ID NO: 179 - DNA, 2349 bp, Homo sapien
gtgatcctcccacctcgacctcccaaagtgctgggattacaggctttgagccaccacacccggcctgagacttatcttactcctgccctgctactgaccctttgcctgtttttactctctctttaggtatgtaggaagctttagaaatttatacacctgctgtgaaataccaaaggttaagaacccccacaataaaatgtagatgagagattccccccccccacttccttcttattacagtcagcccatagagtgggccccatgaatcactaggcgtaggaacagaatggtttatgtggttggttgaactaatctgaaactcttcagttcctttatatgctgtcctaaaggtgagcactgagaggtgaggaagggagagtctgtacactggaggaagagaagttgtttcctcttttatgtaaaacattactgcagttcttctcggtgcaatttgcagagcaactctgagtctacataaataaaaagggaaagaggtggtttttccagcacatctgaggtctgatcccatctatcctttctttgtaggtccttggaagttccagtaaaacatacacatgtttggcttcttgtcattactgttcatgtcctgcatttgcattctcagtgctacggaagagtgacagcatcctgtgcaagcatctcttggcagtttacctgagtcaggttatgaggacctgtcagcagctaagtgtctctgacaagcagttgactgacatattattgatggagaagaaacaagaagcataaaaggactgcaggaggtgctgtgggttggagccgtgggctgtggagggtttgtgtatgatgagaagccctgtacagtcttgtcaagaaataccctgagccagtctctgagacgcttcggtaaaaaatgtccctggatggaatcaagattttaaattcaaataaagcctaatatcatgttgtgtccacattaaaaaaaaagtctttttttttttcttttgagatggagtctcactttgtcgcccaggctggggtgcagtggcgtgatctcagctcactgcaagctccgctcccgggttcacgccattctcctggcctcagcctcccgagtagctgggactacaggtacccgccaccatgcccggctaaatttttgtattttttttttagtagagatggggtttcaccgtgttagccaggatggtctccatctcctgacctagtggtctgcccgcctcgacctcccaaagtgctggaattacatgcatgagccactgcgcctgaccctatttagtcttaagtaactaactgaattactagtaatttttaaaaggttggaatggtgggccaaacagtaagatgaagtttcgacgagtaggtcagttcttttccttgggtccaggaaactattgagcagcaacagaagatcagagcagagatgtggctaaacagtagcaggtatgaaaagacttagaggttctggtttctgtaagcttcaaatatctgtgatgcttgtgccaaaacagcttaagtagactgtattgtttgagagttagtatcgagaacaagggaagaactggtttcactctgcacttctgatctttacaacagggcaattgaaggaacagactaaaaatcgtgtcctggaaggaaactacaggtactaccagggattttcagtctgaagaagaaaagacaaaatagatgacagaaggagtattagaagggagagcgatgagactcagttggacaccgagagagcaaagaagcaataatacgtgaagatgaaaatgaaatcaatttcagcataagaagacaagaacttatggtaaagctgcccacagccagaagaggatcctagaaggacaggaattccctgtctgcagcatttcataagcatgtaatattgttgcagggatactgcagaaggagttgaagcagtggacagacagatgatataggtgattttacagcctaagaaagccctgtgcttgtgcccccaaaacatgaggtgctagtgaatgaatgctgggggaaagcccagggcctaggtgttgcaatgttctgtggttggcagatgctttttgttttgttaaaaagtgcaacagataaaatttatcaatacttttctgctactcaggaaacttggactcagcataacttactttttttccagcagccttcagggtaaagtttagaaggtagatgcaacaagccaatgcagcaccctaagcttgtctttttaagttttatttttatttaacctaatatacacagagttaaataattttacttcataaaattttcacactttgagttccaagaacttaaccaaacttgaaatttggagagaagcaaaattcc

SEQ ID NO: 180 - DNA, 2479 bp, Homo sapien
gtgatcctcccacctcgacctcccaaagtgctgggattacaggctttgagccaccacacccggcctgagacttatcttactcctgccctgctactgaccctttgcctgtttttactctctctttaggtatgtaggaagctttagaaatttatacacctgctgtgaaataccaaaggttaagaacccccacaataaaatgtagatgagagattccccccccccacttccttcttattacagtcagcccatagagtgggccccatgaatcactaggcgtaggaacagaatggtttatgtggttggttgaactaatctgaaactcttcagttcctttatatgctgtcctaaaggtgagcactgagaggtgaggaagggagagtctgtacactggaggaagagaagttgtttcctcttttatgtaaaacattactgcagttcttctcggtgcaatttgcagagcaactctgagtctacataaataaaaagggaaagaggtggtttttccagcacatctgaggtctgatcccatctatcctttctttgtaggtccttggaagttccagtaaaacatacacatgtttggcttcttgtcattactgttcatgtcctgcatttgcattctcagtgctacggaagagtgacagcatcctgtgcaagcatctcttggcagtttacctgagtcaggttatgaggacctgtcagcagctaagtgtctctgacaagcagttgactgacatattattgatggagaagaaacaagaagcataaaaggtacagattgagcatcattctttcaaaatagaatcctgtcaagaaatgcattgaaagcgtcatgattcacatggaaaagaggtgaaatggatcttcagacacttcatgttactgtcccttttccctccaggactgcaggaggtgctgtgggttggagccgtgggctgtggagggtttgtgtatgatgagaagccctgtacagtcttgtcaagaaataccctgagccagtctctgagacgcttcggtaaaaaatgtccctggatggaatcaagattttaaattcaaataaagcctaatatcatgttgtgtccacattaaaaaaaaagtctttttttttttcttttgagatggagtctcactttgtcgcccaggctggggtgcagtggcgtgatctcagctcactgcaagctccgctcccgggttcacgccattctcctggcctcagcctcccgagtagctgggactacaggtacccgccaccatgcccggctaaatttttgtattttttttttagtagagatggggtttcaccgtgttagccaggatggtctccatctcctgacctagtggtctgcccgcctcgacctcccaaagtgctggaattacatgcatgagccactgcgcctgaccctatttagtcttaagtaactaactgaattactagtaatttttaaaaggttggaatggtgggccaaacagtaagatgaagtttcgacgagtaggtcagttcttttccttgggtccaggaaactattgagcagcaacagaagatcagagcagagatgtggctaaacagtagcaggtatgaaaagacttagaggttctggtttctgtaagcttcaaatatctgtgatgcttgtgccaaaacagcttaagtagactgtattgtttgagagttagtatcgagaacaagggaagaactggtttcactctgcacttctgatctttacaacagggcaattgaaggaacagactaaaaatcgtgtcctggaaggaaactacaggtactaccagggattttcagtctgaagaagaaaagacaaaatagatgacagaaggagtattagaagggagagcgatgagactcagttggacaccgagagagcaaagaagcaataatacgtgaagatgaaaatgaaatcaatttcagcataagaagacaagaacttatggtaaagctgcccacagccagaagaggatcctagaaggacaggaattccctgtctgcagcatttcataagcatgtaatattgttgcagggatactgcagaaggagttgaagcagtggacagacagatgatataggtgattttacagcctaagaaagccctgtgcttgtgcccccaaaacatgaggtgctagtgaatgaatgctgggggaaagcccagggcctaggtgttgcaatgttctgtggttggcagatgctttttgttttgttaaaaagtgcaacagataaaatttatcaatacttttctgctactcaggaaacttggactcagcataacttactttttttccagcagccttcagggtaaagtttagaaggtagatgcaacaagccaatgcagcaccctaagcttgtctttttaagttttatttttatttaacctaatatacacagagttaaataattttacttcataaaattttcacactttgagttccaagaacttaaccaaacttgaaatttggagagaagcaaaattcc

SEQ ID NO: 181 - DNA, 2391 bp, Homo sapien
ctttgagaaggaaaaaaagggaatcccagaagtgggcactggggaattagatggccccataaaaatatgaactaaattcgatgttgacaactttgcatatcctactttcagccatgtggtatatctttgcactacctgtgagacagcctgacgccacacttgaccttcacatggggcatgagtaccttcacctattcctttaagcctttgccaatttcatcagagtccagaccatgaagcagaaacaggacatactcacacacaccttattccaaaggaaaaaacactaccttcctgaaagcaggcagctattttctaagtcttgcgaaagaagaaaataatgatgtccactccattctttccctttcttttacactgttaacttcttaaacatcttgggacctggctggcaagttgggtatagcattgtccaagaggccacattcgtaactgatgtgccctaagtgtatctcaactgcaagagacaggattgaaccaaaaccccttcaagatctaaagctgtgttctctgacatcagattcaacgcaatcatctccccagagtgcaagcatctcttggcagtttacctgagtcaggttatgaggacctgtcagcagctaagtgtctctgacaagcagttgactgacatattattgatggagaagaaacaagaagcataaaaggtacagattgagcatcattctttcaaaatagaatcctgtcaagaaatgcattgaaagcgtcatgattcacatggaaaagaggtgaaatggatcttcagacacttcatgttactgtcccttttccctccaggactgcaggaggtgctgtgggttggagccgtgggctgtggagggtttgtgtatgatgagaagccctgtacagtcttgtcaagaaataccctgagccagtctctgagacgcttcggtaaaaaatgtccctggatggaatcaagattttaaattcaaataaagcctaatatcatgttgtgtccacattaaaaaaaaagtctttttttttttcttttgagatggagtctcactttgtcgcccaggctggggtgcagtggcgtgatctcagctcactgcaagctccgctcccgggttcacgccattctcctggcctcagcctcccgagtagctgggactacaggtacccgccaccatgcccggctaaatttttgtattttttttttagtagagatggggtttcaccgtgttagccaggatggtctccatctcctgacctagtggtctgcccgcctcgacctcccaaagtgctggaattacatgcatgagccactgcgcctgaccctatttagtcttaagtaactaactgaattactagtaatttttaaaaggttggaatggtgggccaaacagtaagatgaagtttcgacgagtaggtcagttcttttccttgggtccaggaaactattgagcagcaacagaagatcagagcagagatgtggctaaacagtagcaggtatgaaaagacttagaggttctggtttctgtaagcttcaaatatctgtgatgcttgtgccaaaacagcttaagtagactgtattgtttgagagttagtatcgagaacaagggaagaactggtttcactctgcacttctgatctttacaacagggcaattgaaggaacagactaaaaatcgtgtcctggaaggaaactacaggtactaccagggattttcagtctgaagaagaaaagacaaaatagatgacagaaggagtattagaagggagagcgatgagactcagttggacaccgagagagcaaagaagcaataatacgtgaagatgaaaatgaaatcaatttcagcataagaagacaagaacttatggtaaagctgcccacagccagaagaggatcctagaaggacaggaattccctgtctgcagcatttcataagcatgtaatattgttgcagggatactgcagaaggagttgaagcagtggacagacagatgatataggtgattttacagcctaagaaagccctgtgcttgtgcccccaaaacatgaggtgctagtgaatgaatgctgggggaaagcccagggcctaggtgttgcaatgttctgtggttggcagatgctttttgttttgttaaaaagtgcaacagataaaatttatcaatacttttctgctactcaggaaacttggactcagcataacttactttttttccagcagccttcagggtaaagtttagaaggtagatgcaacaagccaatgcagcaccctaagcttgtctttttaagttttatttttatttaacctaatatacacagagttaaataattttacttcataaaattttcacactttgagttccaagaacttaaccaaacttgaaatttggagagaagcaaaattcc

SEQ ID NO: 182 - DNA, 1928 bp, Homo sapien
gtcttctcctgccaaataagatggtaatgagaaatcttggttagactggccagccctggccctgcctgtttctaataggtgtgtgtgttttatattccagtgcaagcatctcttggcagtttacctgagtcaggttatgaggacctgtcagcagctaagtgtctctgacaagcagttgactgacatattattgatggagaagaaacaagaagcataaaaggtacagattgagcatcattctttcaaaatagaatcctgtcaagaaatgcattgaaagcgtcatgattcacatggaaaagaggtgaaatggatcttcagacacttcatgttactgtcccttttccctccaggactgcaggaggtgctgtgggttggagccgtgggctgtggagggtttgtgtatgatgagaagccctgtacagtcttgtcaagaaataccctgagccagtctctgagacgcttcggtaaaaaatgtccctggatggaatcaagattttaaattcaaataaagcctaatatcatgttgtgtccacattaaaaaaaaagtctttttttttttcttttgagatggagtctcactttgtcgcccaggctggggtgcagtggcgtgatctcagctcactgcaagctccgctcccgggttcacgccattctcctggcctcagcctcccgagtagctgggactacaggtacccgccaccatgcccggctaaatttttgtattttttttttagtagagatggggtttcaccgtgttagccaggatggtctccatctcctgacctagtggtctgcccgcctcgacctcccaaagtgctggaattacatgcatgagccactgcgcctgaccctatttagtcttaagtaactaactgaattactagtaatttttaaaaggttggaatggtgggccaaacagtaagatgaagtttcgacgagtaggtcagttcttttccttgggtccaggaaactattgagcagcaacagaagatcagagcagagatgtggctaaacagtagcaggtatgaaaagacttagaggttctggtttctgtaagcttcaaatatctgtgatgcttgtgccaaaacagcttaagtagactgtattgtttgagagttagtatcgagaacaagggaagaactggtttcactctgcacttctgatctttacaacagggcaattgaaggaacagactaaaaatcgtgtcctggaaggaaactacaggtactaccagggattttcagtctgaagaagaaaagacaaaatagatgacagaaggagtattagaagggagagcgatgagactcagttggacaccgagagagcaaagaagcaataatacgtgaagatgaaaatgaaatcaatttcagcataagaagacaagaacttatggtaaagctgcccacagccagaagaggatcctagaaggacaggaattccctgtctgcagcatttcataagcatgtaatattgttgcagggatactgcagaaggagttgaagcagtggacagacagatgatataggtgattttacagcctaagaaagccctgtgcttgtgcccccaaaacatgaggtgctagtgaatgaatgctgggggaaagcccagggcctaggtgttgcaatgttctgtggttggcagatgctttttgttttgttaaaaagtgcaacagataaaatttatcaatacttttctgctactcaggaaacttggactcagcataacttactttttttccagcagccttcagggtaaagtttagaaggtagatgcaacaagccaatgcagcaccctaagcttgtctttttaagttttatttttatttaacctaatatacacagagttaaataattttacttcataaaattttcacactttgagttccaagaacttaaccaaacttgaaatttggagagaagcaaaattcc

SEQ ID NO: 183 - DNA, 846 bp, Homo sapien
cgcgccccgacgtcactccgtctcgccctgccccggcggggggtcaggatcctccacaggtaggcgcagtcagctggagcgtcgcggcggtccgccggtcgtggagggcgtgtcctgcggcgcgatggccgtagtgttgccggcggttgtggaggagctcctgagcgagatggcggcggcggtgcaggagagcgcgcgaattcctgatgaatatctgttatcgctgaagtttctctttggctcatcagccacccaggccttggacctagttgatcgacagtccatcaccttaatctcatcacccagtggaaggcgtgtttaccagagacagggtctcactatgttgcccaggctggtctcaaactcctaggttcaagcgatcctcccaccttggcctctcacaatattgggattacagtgcaagcatctcttggcagtttacctgagtcaggttatgaggacctgtcagcagctaagtgtctctgacaagcagttgactgacatattattgatggagaagaaacaagaagcataaaaggtacagattgagcatcattctttcaaaatagaatcctgtcaagaaatgcattgaaagcgtcatgattcacatggaaaagaggtgaaatggatcttcagacacttcatgttactgtcccttttccctccaggactgcaggaggtgctgtgggttggagccgtgggctgtggagggtttgtgtatgatgagaagccctgtacagtcttgtcaagaaataccctgagccagtctctgagacgcttcggtaaaaaatgtccctggatggaatcaagattttaaattcaaataaagcctaatatcatgttgtg

SEQ ID NO: 184 - DNA, 728 bp, Homo sapien
cgcgccccgacgtcactccgtctcgccctgccccggcggggggtcaggatcctccacaggtaggcgcagtcagctggagcgtcgcggcggtccgccggtcgtggagggcgtgtcctgcggcgcgatggccgtagtgttgccggcggttgtggaggagctcctgagcgagatggcggcggcggtgcaggagagcgcgcgaattcctgatgaatatctgttatcgctgaagtttctctttggctcatcagccacccaggccttggacctagttgatcgacagtccatcaccttaatctcatcacccagtggaaggcgtgtttaccaggtccttggaagttccagtaaaacatacacatgtttggcttcttgtcattactgttcatgtcctgcatttgcattctcagtgctacggaagagtgacagcatcctgtgcaagcatctcttggcagtttacctgagtcaggttatgaggacctgtcagcagctaagtgtctctgacaagcagttgactgacatattattgatggagaagaaacaagaagcataaaaggactgcaggaggtgctgtgggttggagccgtgggctgtggagggtttgtgtatgatgagaagccctgtacagtcttgtcaagaaataccctgagccagtctctgagacgcttcggtaaaaaatgtccctggatggaatcaagattttaaattcaaataaagcctaatatcatgttgtg

SEQ ID NO: 185 - DNA, 2258 bp, Homo sapien
cgcgccccgacgtcactccgtctcgccctgccccggcggggggtcaggatcctccacaggtaggcgcagtcagctggagcgtcgcggcggtccgccggtcgtggagggcgtgtcctgcggcgcgatggccgtagtgttgccggcggttgtggaggagctcctgagcgagatggcggcggcggtgcaggagagcgcgcgaattcctgatgaatatctgttatcgctgaagtttctctttggctcatcagccacccaggccttggacctagttgatcgacagtccatcaccttaatctcatcacccagtggaaggcgtgtttaccaggtccttggaagttccagtaaaacatacacatgtttggcttcttgtcattactgttcatgtcctgcatttgcattctcagtgctacggaagagtgacagcatcctgtgcaagcatctcttggcagtttacctgagtcaggttatgaggacctgtcagcagctaagtgtctctgacaagcagttgactgacatattattgatggagaagaaacaagaagcataaaaggtacagattgagcatcattctttcaaaatagaatcctgtcaagaaatgcattgaaagcgtcatgattcacatggaaaagaggtgaaatggatcttcagacacttcatgttactgtcccttttccctccaggactgcaggaggtgctgtgggttggagccgtgggctgtggagggtttgtgtatgatgagaagccctgtacagtcttgtcaagaaataccctgagccagtctctgagacgcttcggtaaaaaatgtccctggatggaatcaagattttaaattcaaataaagcctaatatcatgttgtgtccacattaaaaaaaaagtctttttttttttcttttgagatggagtctcactttgtcgcccaggctggggtgcagtggcgtgatctcagctcactgcaagctccgctcccgggttcacgccattctcctggcctcagcctcccgagtagctgggactacaggtacccgccaccatgcccggctaaatttttgtattttttttttagtagagatggggtttcaccgtgttagccaggatggtctccatctcctgacctagtggtctgcccgcctcgacctcccaaagtgctggaattacatgcatgagccactgcgcctgaccctatttagtcttaagtaactaactgaattactagtaatttttaaaaggttggaatggtgggccaaacagtaagatgaagtttcgacgagtaggtcagttcttttccttgggtccaggaaactattgagcagcaacagaagatcagagcagagatgtggctaaacagtagcaggtatgaaaagacttagaggttctggtttctgtaagcttcaaatatctgtgatgcttgtgccaaaacagcttaagtagactgtattgtttgagagttagtatcgagaacaagggaagaactggtttcactctgcacttctgatctttacaacagggcaattgaaggaacagactaaaaatcgtgtcctggaaggaaactacaggtactaccagggattttcagtctgaagaagaaaagacaaaatagatgacagaaggagtattagaagggagagcgatgagactcagttggacaccgagagagcaaagaagcaataatacgtgaagatgaaaatgaaatcaatttcagcataagaagacaagaacttatggtaaagctgcccacagccagaagaggatcctagaaggacaggaattccctgtctgcagcatttcataagcatgtaatattgttgcagggatactgcagaaggagttgaagcagtggacagacagatgatataggtgattttacagcctaagaaagccctgtgcttgtgcccccaaaacatgaggtgctagtgaatgaatgctgggggaaagcccagggcctaggtgttgcaatgttctgtggttggcagatgctttttgttttgttaaaaagtgcaacagataaaatttatcaatacttttctgctactcaggaaacttggactcagcataacttactttttttccagcagccttcagggtaaagtttagaaggtagatgcaacaagccaatgcagcaccctaagcttgtctttttaagttttatttttatttaacctaatatacacagagttaaataattttacttcataaaattttcacactttgagttccaagaacttaaccaaacttgaaatttggagagaagcaaaattcc

SEQ ID NO: 186 - DNA, 1544 bp, Homo sapien
cgcgccccgacgtcactccgtctcgccctgccccggcggggggtcaggatcctccacaggtaggcgcagtcagctggagcgtcgcggcggtccgccggtcgtggagggcgtgtcctgcggcgcgatggccgtagtgttgccggcggttgtggaggagctcctgagcgagatggcggcggcggtgcaggagagcgcgcgaattcctgatgaatatctgttatcgctgaagtttctctttggctcatcagccacccaggccttggacctagttgatcgacagtccatcaccttaatctcatcacccagtggaaggcgtgtttaccaggtccttggaagttccagtaaaacatacacatgtttggcttcttgtcattactgttcatgtcctgcatttgcattctcagtgctacggaagagtgacagcatcctgtgcaagcatctcttggcagtttacctgagtcaggttatgaggacctgtcagcagctaagtgtctctgacaagcagttgactgacatattattgatggagaagaaacaagaagcataaaaggactgcaggaggtgctgtgggttggagccgtgggctgtggagggtttgtgtatgatgagaagccctgtacagtcttgtcaagaaataccctgagccagtctctgagacgcttcggtaaaatggagtctcactttgtcgcccaggctggggtgcagtggcgtgatctcagctcactgcaagctccgctcccgggttcacgccattctcctggcctcagcctcccgagtagctgggactacagggcaattgaaggaacagactaaaaatcgtgtcctggaaggaaactacaggtactaccagggattttcagtctgaagaagaaaagacaaaatagatgacagaaggagtattagaagggagagcgatgagactcagttggacaccgagagagcaaagaagcaataatacgtgaagatgaaaatgaaatcaatttcagcataagaagacaagaacttatggtaaagctgcccacagccagaagaggatcctagaaggacaggaattccctgtctgcagcatttcataagcatgtaatattgttgcagggatactgcagaaggagttgaagcagtggacagacagatgatataggtgattttacagcctaagaaagccctgtgcttgtgcccccaaaacatgaggtgctagtgaatgaatgctgggggaaagcccagggcctaggtgttgcaatgttctgtggttggcagatgctttttgttttgttaaaaagtgcaacagataaaatttatcaatacttttctgctactcaggaaacttggactcagcataacttactttttttccagcagccttcagggtaaagtttagaaggtagatgcaacaagccaatgcagcaccctaagcttgtctttttaagttttatttttatttaacctaatatacacagagttaaataattttacttcataaaattttcacactttgagttccaagaacttaaccaaacttgaaatttggagagaagcaaaattcc

SEQ ID NO: 187 - DNA, 1987 bp, Homo sapien
cgcgccccgacgtcactccgtctcgccctgccccggcggggggtcaggatcctccacagttcctgatgaatatctgttatcgctgaagtttctctttggctcatcagccacccaggccttggacctagttgatcgacagtccatcaccttaatctcatcacccagtggaaggcgtgtttaccaggtccttggaagttccagtaaaacatacacatgtttggcttcttgtcattactgttcatgtcctgcatttgcattctcagtgctacggaagagtgacagcatcctgtgcaagcatctcttggcagtttacctgagtcaggttatgaggacctgtcagcagctaagtgtctctgacaagcagttgactgacatattattgatggagaagaaacaagaagcataaaaggactgcaggaggtgctgtgggttggagccgtgggctgtggagggtttgtgtatgatgagaagccctgtacagtcttgtcaagaaataccctgagccagtctctgagacgcttcggtaaaaaatgtccctggatggaatcaagattttaaattcaaataaagcctaatatcatgttgtgtccacattaaaaaaaaagtctttttttttttcttttgagatggagtctcactttgtcgcccaggctggggtgcagtggcgtgatctcagctcactgcaagctccgctcccgggttcacgccattctcctggcctcagcctcccgagtagctgggactacaggtacccgccaccatgcccggctaaatttttgtattttttttttagtagagatggggtttcaccgtgttagccaggatggtctccatctcctgacctagtggtctgcccgcctcgacctcccaaagtgctggaattacatgcatgagccactgcgcctgaccctatttagtcttaagtaactaactgaattactagtaatttttaaaaggttggaatggtgggccaaacagtaagatgaagtttcgacgagtaggtcagttcttttccttgggtccaggaaactattgagcagcaacagaagatcagagcagagatgtggctaaacagtagcaggtatgaaaagacttagaggttctggtttctgtaagcttcaaatatctgtgatgcttgtgccaaaacagcttaagtagactgtattgtttgagagttagtatcgagaacaagggaagaactggtttcactctgcacttctgatctttacaacagggcaattgaaggaacagactaaaaatcgtgtcctggaaggaaactacaggtactaccagggattttcagtctgaagaagaaaagacaaaatagatgacagaaggagtattagaagggagagcgatgagactcagttggacaccgagagagcaaagaagcaataatacgtgaagatgaaaatgaaatcaatttcagcataagaagacaagaacttatggtaaagctgcccacagccagaagaggatcctagaaggacaggaattccctgtctgcagcatttcataagcatgtaatattgttgcagggatactgcagaaggagttgaagcagtggacagacagatgatataggtgattttacagcctaagaaagccctgtgcttgtgcccccaaaacatgaggtgctagtgaatgaatgctgggggaaagcccagggcctaggtgttgcaatgttctgtggttggcagatgctttttgttttgttaaaaagtgcaacagataaaatttatcaatacttttctgctactcaggaaacttggactcagcataacttactttttttccagcagccttcagggtaaagtttagaaggtagatgcaacaagccaatgcagcaccctaagcttgtctttttaagttttatttttatttaacctaatatacacagagttaaataattttacttcataaaattttcacactttgagttccaagaacttaaccaaacttgaaatttggagagaagcaaaattcc

SEQ ID NO: 188 - DNA, 2025 bp, Homo sapien
cgcgccccgacgtcactccgtctcgccctgccccggcggggggtcaggatcctccacaggtaggcgcagtcagctggagcgtcgcggcggtccgccggtcgtggagggcgtgtcctgcggcgcgatggccgtagtgttgccggcggttgtggaggagctcctgagcgagatggcggcggcggtgcaggagagcgcgcgaattcctgatgaatatctgttatcgtccttggaagttccagtaaaacatacacatgtttggcttcttgtcattactgttcatgtcctgcatttgcattctcagtgctacggaagagtgacagcatcctgtgcaagcatctcttggcagtttacctgagtcaggttatgaggacctgtcagcagctaagtgtctctgacaagcagttgactgacatattattgatggagaagaaacaagaagcataaaaggactgcaggaggtgctgtgggttggagccgtgggctgtggagggtttgtgtatgatgagaagccctgtacagtcttgtcaagaaataccctgagccagtctctgagacgcttcggtaaaaaatgtccctggatggaatcaagattttaaattcaaataaagcctaatatcatgttgtgtccacattaaaaaaaaagtctttttttttttcttttgagatggagtctcactttgtcgcccaggctggggtgcagtggcgtgatctcagctcactgcaagctccgctcccgggttcacgccattctcctggcctcagcctcccgagtagctgggactacaggtacccgccaccatgcccggctaaatttttgtattttttttttagtagagatggggtttcaccgtgttagccaggatggtctccatctcctgacctagtggtctgcccgcctcgacctcccaaagtgctggaattacatgcatgagccactgcgcctgaccctatttagtcttaagtaactaactgaattactagtaatttttaaaaggttggaatggtgggccaaacagtaagatgaagtttcgacgagtaggtcagttcttttccttgggtccaggaaactattgagcagcaacagaagatcagagcagagatgtggctaaacagtagcaggtatgaaaagacttagaggttctggtttctgtaagcttcaaatatctgtgatgcttgtgccaaaacagcttaagtagactgtattgtttgagagttagtatcgagaacaagggaagaactggtttcactctgcacttctgatctttacaacagggcaattgaaggaacagactaaaaatcgtgtcctggaaggaaactacaggtactaccagggattttcagtctgaagaagaaaagacaaaatagatgacagaaggagtattagaagggagagcgatgagactcagttggacaccgagagagcaaagaagcaataatacgtgaagatgaaaatgaaatcaatttcagcataagaagacaagaacttatggtaaagctgcccacagccagaagaggatcctagaaggacaggaattccctgtctgcagcatttcataagcatgtaatattgttgcagggatactgcagaaggagttgaagcagtggacagacagatgatataggtgattttacagcctaagaaagccctgtgcttgtgcccccaaaacatgaggtgctagtgaatgaatgctgggggaaagcccagggcctaggtgttgcaatgttctgtggttggcagatgctttttgttttgttaaaaagtgcaacagataaaatttatcaatacttttctgctactcaggaaacttggactcagcataacttactttttttccagcagccttcagggtaaagtttagaaggtagatgcaacaagccaatgcagcaccctaagcttgtctttttaagttttatttttatttaacctaatatacacagagttaaataattttacttcataaaattttcacactttgagttccaagaacttaaccaaacttgaaatttggagagaagcaaaattcc

SEQ ID NO: 189 - DNA, 806 bp, Homo sapien
cgcgccccgacgtcactccgtctcgccctgccccggcggggggtcaggatcctccacaggtaggcgcagtcagctggagcgtcgcggcggtccgccggtcgtggagggcgtgtcctgcggcgcgatggccgtagtgttgccggcggttgtggaggagctcctgagcgagatggcggcggcggtgcaggagagcgcgcgaattcctgatgaatatctgttatcgctgaagtttctctttggctcatcagccacccaggccttggacctagttgatcgacagtccatcaccttaatctcatcacccagtggaaggcgtgtttaccaggtccttggaagttccagtaaaacatacacatgtttggcttcttgtcattactgttcatgtcctgcatttgcattctcagtgctacggaagagtgacagcatcctgtgcaagcatctcttggcagtttacctgagtcaggttatgaggacctgtcagcagctaagtgtctctgacaagcagttgactgacatattattgatggagaagaaacaagaagcataaaaggactgcaggaggtgctgtgggttggagccgtgggctgtggagggtttgtgtatgatgagaagccctgtacagtcttgtcaagaaataccctgagccagtctctgagacgcttcggtaaaaaatgtccctggatggaatcaagattttaaattcaaataaagcctaatatcatgttgtgaaaaaaaaacacaaaaacaacaaacaaaaccacacacacaaatccacaccacaacaccaacaaacaacaacagggggg

SEQ ID NO: 190 - DNA, 1013 bp, Homo sapien
cttgaactttgttcttttctttaaaatacagtgttttttagaagagcccacatcatgacaatttacaaataagccattaaactcttcatgttttaagaaaagatgagttcatttattcaattcttatggtatgttaagtttgcatttagcatctcatttctcaaaactgtcacattggattgttactgttatttacttttgttttatagatgaaattgaagcacgtagaaattaataatatgcccaaggctcacacagtgaataagggataaagctcaaattttaatatgaaccctctgacttgaacccatagtcttatccattttgctctctactgcctcccaggcagtatgctaccagtccccatggccatgacccttaccccatctctctcagtcatcccttaggcttatcttatttcttactatatcattgtaatttttttaaaagctaatttataaaacaagtagggtaaccagctgtcttggtttgcccaggactgcccagttgtagcactacacgtcctgcattctttgaaacccctcagttctgggcaaactgggagttggtcaccctcagcctattccttacccaaacctatccttgcatctcatttcattcttcttctcacaaccatgatctgaggctcagagatgagatacgaggttacagaattagatgcaagtcagaattttacacacacgtacacacacacggagctaggtattaaaaagcagtgtttatacattttggtttttctgtatccagccacttcaaaaatagctttgtcaaaacgtggagaaatagtgcatcctgtctgtcatgtttccatgaagactttcccatgcatacaaagcatgtgaggagtattggctacattacacaccaaactagatgggaatggaatggtgtacaaagtacattcacattttgttcaatattttgtattatttggaacttttataagaattgttaatgtattatattagtaaaagagtattcactaaagatct

SEQ ID NO: 191 - DNA, 1011 bp, Homo sapien
cttgaactttgttcttttctttaaaatacagtgttttttagaagagcccacatcatgacaatttacaaataagccattaaactcttcatgttttaagaaaagatgagttcatttattcaattcttatggtatgttaagtttgcatttagcatctcatttctcaaaactgtcacattggattgttactgttatttacttttgttttatagatgaaattgaagcacgtagaaattaataatatgcccaaggtcacacagtgaataagggataaagctcaaattttaatatgaaccctctgacttgaacccatagtcttatccattttgctctctactgcctcccaggcagtatgctaccagtccccatggccatgacccttaccccatctctctcagtcatcccttaggcttatcttatttcttactatatcattgtaatttttttaaaagctaatttataaaacaagtagggtaaccagctgtcttggtttgcccaggactgcccagttgtagcactacacgtcctgcattctttgaaacccctcagttctgggcaaactgggagttggtcaccctcagcctattccttacccaaacctatccttgcatctcatttcattcttcttctcacaaccatgatctgaggctcagagatgagatacgaggttacagaattagatgcaagtcagaattttacacacacgtacacacacacggagctaggtattaaaaagcagtgtttatacattttggtttttctgtatccagccacttcaaaaatagctttgtcaaaacgtggagaaatagtgcatcctgtctgtcatgtttccatgaagactttcccatgcatacaaagcatgtgaggagtattggcacattacacaccaaactagatgggaatggaatggtgtaaaaagtacattcacattttgttcaatattttgtattatttggaacttttataagaattgttaatgtattatattagtaaaagagtattcactaaagatct

SEQ ID NO: 192 - DNA, 272 bp, Homo sapien
gctcttggctggccatcccaaccaagactcttaagtgtggactctgaagtctccaggcctggggtgctcgggaggtctccatgccttgacagggcagggtgtggccaccacagaccctcccatgagatcctccagcaggctgtgttgagtagatctatgttgggccatggctggggccaggggctggaggagcaggtcccgcactgccacatgcttggacacggcatgtactgagtggtcctggggggtggccagtggtgctgatgtgtggc

SEQ ID NO: 193 - DNA, 1022 bp, Homo sapien
  misc_feature (886)..(910): n=a,c,g or t
tgtttaggctttttatagcctatgttcttatgagcagtaaacattatgatggtttagttagacctgttgaattgaattcacttcttctgcctgtggtcaggtatcaggtagcacagccacagaagttactgaatgtctttgttggtggactttaggagagtggtttaatttatgtggtattctatctgggattgcagcagtattgttagattgcattttgtcacagggaggaaattacctggtaactcctgattaggaacaaaatgaagcttcccctttttacaaatcctggctaacattccatttggctctcttctgttgaccacctctctctctcccctccctcctcactccattttctcagttattttattgtttactattggaagtcacctcccaactcaggatacttgttagtccattttaggaaaaatatcaccattctttcactattattctctgttgaagttgaagaacagaatattactttttttctttccattattggttacaccagctagttagagacttggggtaatactgtgggcatgggttggatcctgatatctgtgtcagttagtgagagttggttctatgaccctagagctctttgtgtccttcaaacgagggtgctgaaacaagaccgaaccatagaactgtctataccaagcaaaaaactcctgaaagcacatgcccactgcaggtgaattggtagcatagtgtggagataagtgggcagtgcttggtcctgtttctgcctcctagagagtacctctcagcatccagggatgctttagtaactcttagttaaaacgaaatgaactataattaattacctttcttttgggagggacacagagagtttcaacagcatctacaatgcttnnnnnnnnnnnnnnnnnnnnnnnnntgatagaatattaagattgacagagctggggatgggttggaggctgaattatgatgtgtgttttctttatgcttgaattatttcataattaaaaacaaaacatatctataac

SEQ ID NO: 194 - DNA, 761 bp, Homo sapien
ctaaaatacttggtcttaatgttagaggacctgagtgcaatgcaatgctcatttacttgccagttttttatcctggacaaataagttacttcatatctagtacccctgtttactcatctttaaaatgtgaataatacctgtttcataggttgttctaaagactacatggctaacgcatctgggactagctaacacgacacctggtaaatagtaagaactttaaaaaaatttatcatttttttaattacatgtaattattgatgacattgttggtttatttttatattataatttcctatggctaaacctagctcaatagtaaattttcaataaatggtaggttaatttattactggatttattcagtatttctcacatctgttcctttcttctcatttttaaagtattttcaaaactgtttccctctgtctctccagactaattgggtaactagcaactacataaagacaacctatggatttcaaggatctttcattactgtaaacctggtaatcaaactggtaactctttctgaggcctgaagaagttgctgttctgagagttctgttatgcagccatcactgtttttaggtgttttcctttgctatagaaataaatgagaagtatgtatgtggtttatttcacttcattttattctgaccaacacagtagtgaagcttccaattgaagacagagtaattatacatgtcatatccagtaaagaattaatggcatcttttcgttcctcaccaaaagggtaa

SEQ ID NO: 195 - DNA, 854 bp, Homo sapien
ctaaaatacttggtcttaatgttagaggacctgagtgcaatgcaatgctcatttacttgccagttttttatcctggacaaataagttacttcatatctagtacccctgtttactcatctttaaaatgtgaataatacctgtttcataggttgttctaaagactacatggctaacgcatctgggactagctaacacgacacctggtaaatagtaagaactttaaaaaaatttatcatttttttaattacatgtaattattgatgacattgttggtttatttttatattataatttcctatggctaaacctagctcaatagtaaattttcaataaatggtaggttaatttattactggatttattcagtatttctcacatctgttcctttcttctcatttttaaagtattttcaaaactgtttccctctgtctctccagactaattgggtaactagcaactacataaagacaacctatggatttcaaggatctttcattactgtaaacctggtaatcaaactggtaactctttctgaggcctgaagaagttgctgttctgagagttctgttatgcagccatcactgtttttaggtgttttcctttgctatagaaataaatgagaagtatgtatgtggtttatttcacttcattttattctgaccaacacagtagtgaagcttccaattgaagacagagtaattatacatgtcatatccagtaaagaattaatggcatcttttcgttcctcaccaaaaggggtaaatcagaggctaggggagtcatctggataaaagagaatattttactcatttagaatttagaatgcatcgtatgcctggttagtatttctttct

SEQ ID NO: 196 - DNA, 852 bp, Homo sapien
ctaaaatacttggtcttaatgttagaggacctgagtgcaatgcaatgctcatttacttgccagttttttatcctggacaaataagttacttcatatctagtacccctgtttactcatctttaaaatgtgaataatacctgtttcataggttgttctaaagactacatggctaacgcatctgggactagctaacacgacacctggtaaatagtaagaactttaaaaaaatttatcatttttttaattacatgtaattattgatgacattgttggtttatttttatattataatttcctatggctaaacctagctcaatagtaaattttcaataaatggtaggttaatttattactggatttattcagtatttctcacatctgttcctttcttctcatttttaaagtattttcaaaactgtttccctctgtctctccagactaattgggtaactagcaactacataaagacaacctatggatttcaaggatctttcattactgtaaacctggtaatcaaactggtaactctttctgaggcctgaagaagttgctgttctgagagttctgttatgcagccatcactgtttttaggtgttttcctttgctatagaaataaatgagaagtatgtatgtggtttatttcacttcattttattctgaccaacacagtagtgaagcttccaattgaagacagagtaattatacatgtcatatccagtaaagaattaatggcatcttttcgttcctcaccaaaaggggtaaatcagaggctaggggagtcatctggataaaagagaatattttactcatttagaatttagaatgcatcgtatgcctgtttagtattttact

SEQ ID NO: 197 - DNA, 860 bp, Homo sapien
ctgctccatgaatgtagagaagagaggcatttccaagaccaggtgaggaatccacatggggcgcaccctaaggcagaaaggagaggggttgagcatgagaacgaggaggcgctggctggctgcaggacaggaaatcatagaggtaaaaatgcttcctctccctcccgtctctgcaccccttgccaggcccagcagagcctgtggctaagcctgggcaggtctgggcaggcatccggggagtcctgaaggctgacaaatgcagggacacggatggggtcagctggaaaggtcgaagttgggcccaagaagacaggaactttctactgggtgaagcagccaggatcggacttcctagcccaatctgtgcttgctaagcccttcagccccatcaggctgcccatgggtgacagtctcccctgctccggagcctctcctctcaccgcgctcccttctatcagcaacaccctgcttctccttaccccctcctccaggaaaccttcccagaccagtcacttgggcttccccatctctccttctcagtgcacttggggccaccctgggcacgcacactataggtgcctggacctgaggtgacaaggccattcagccggcacttactgtagggcacttcaaacacacataccagccttcctgtgatgttagataatcatcctctctgtgccagctgggaaactgaggcccagagaggtgaagggatagcccaagatccaaagcccacatgggaactttcttcctgtccattcagacacagtcacatcctccagcagaggcgtgggtgagtggtgagtggtgaggagggtgtctcctcaatccaggagaattacgtcaagaattcccca

SEQ ID NO: 198 - DNA, 978 bp, Homo sapien
ctgctccatgaatgtagagaagagaggcatttccaagaccaggtgaggaatccacatggggcgcaccctaaggcagaaaggagaggggttgagcatgagaacgaggaggcgctggctggctgcaggacaggaaatcatagaggtaaaaatgcttcctctccctcccgtctctgcaccccttgccaggcccagcagagcctgtggctaagcctgggcaggtctgggcaggcatccggggagtcctgaaggctgacaaatgcagggacacggatggggtcagctggaaaggtcgaagttgggcccaagaagacaggaactttctactgggtgaagcagccaggatcggacttcctagcccaatctgtgcttgctaagcccttcagccccatcaggctgcccatgggtgacagtctcccctgctccggagcctctcctctcaccgcgctcccttctatcagcaacaccctgcttctccttaccccctcctccaggaaaccttcccagaccagtcacttgggcttccccatctctccttctcagtgcacttggggccaccctgggcacgcacactataggtgcctggacctgaggtgacaaggccattcagccggcacttactgtagggcacttcaaacacacataccagccttcctgtgatgttagataatcatcctctctgtgccagctgggaaactgaggcccagagaggtgaagggatagcccaagatccaaagcccacatgggaactttcttcctgtccattcagacacagtcacatcctccagcagaggcgtgggtgagtggtgagtggtgaggagggtgtctcctcaatccaggagaattacgtcaagaattccccaccaggcacagtagctcacccccataatcccagcactttgggaaaccgaggcaggaggatcccttgagcccaggagttcaagagcagcctggacaacatagcaagaccccatctctaca

SEQ ID NO: 199 - DNA, 1227 bp, Homo sapien
tgatacagcacagcccgtgacagggaagcaatgcccactctctatgccacaggcaccacggtgaggagagaactcccaccctggctttgattccctgagggaagccaaaatccaagaggatcatgcacccaagatccactcccacagagtgccttgtgccactgcattcacgagctgagccacactcagaatctggaaaacacaaggttcttacctgtgggtcactgggcccctcatcaggcaaaccccagcccttcctgctccatcttccaggcacaggaatgagaggtctctaactcttctcacataccaaatttctaggtatgtggctttctggacccaaagctgaaaatatggcttaaaggccgggcgcagatggctgacgcctgtaatcccagacagagagttctatatgctcactccccagagctgtcggggcagggagccaggaggttcaagaaagagcaagggcaactctctccctccgagagtttacagtcttatcgcatgtatgcaagtagctctactgtaagacacaaaataatcccagtgcaggaggaaggaaagactctagctacctggatgaacccaggaaggcctcctggaagagaaggcagaggatcaggtctagaaaaaaggtagaatttggagaaagggtattcaggtagaggaaacagagcaaagactcggaggcaagaatgtatagggcatagaatgtatacggaaggggagaggaagcaacttgatttgtttggagtcaaggcccatgaaggggtggagtggggtctgaaggctgacaaatgcagggacacggatggggtcagctggaaaggtcgaagttgggcccaagaagacaggaactttctactgggtgaagcagccaggatcggacttcctagcccaacctgtgcttgctaagcccttcagccccatcaggctgcccatgggtgacagtctcccctgctccggagcctctcctctcactgcgctcccttctatcagcaacaccctgcttctccttaccccctcctccaggaaaccttcccagaccagtcacttgggcttccccatctctccttctcagtgcacttggggccaccctgggcacgcacactataggtgcctggacctgaggtgacaaggccattcagccggcacttactgtagggcacttcaaacacacataccagccttcctgtgatgttagataatcatcctctctgtgcc

SEQ ID NO: 200 - DNA, 978 bp, Homo sapien
ctgctccatgaatgtagagaagagaggcatttccaagaccaggtgaggaatccacatggggtgcaccctaaggcagaaaggagaggggctgagcatgagaacgaggaggcgctggctggctgcaggacaggaaatcatagaggtaaaaatgcttcctctccctcccgtctctgcaccccttgccaggcccagcagagcctgtggctaagcctgggcaggtctgagcaggcatccggggagtcctgaaggctgacaaatgcagggacacggatggggtcagctggaaaggtcgaagttgggcccaagaagacaggaactttctactgggtgaagcagccaggatcggacttcctagcccaacctgtgcttgctaagcccttcagccccatcaggctgcccatgggtgacagtctcccctgctccggagcctctcctctcactgcgctcccttctatcagcaacaccctgcttctccttaccccctcctccaggaaaccttcccagaccagtcacttgggcttccccatctctccttctcagtgcacttggggccaccctgggcacgcacactataggtgcctggacctgaggtgacaaggccattcagccggcacttactgtagggcacttcaaacacacataccagccttcctgtgatgttagataatcatcctctctgtgccagctgggaaactgaggcccagagaggtgaagggatagcccaagatccaaagcccacatgggaactttcttcctgtccattcagacacagtcacatcctccagcagaggcgtgggtgagtggtgagtggtgaggagggtgtctcctcaatccaggagaattacgtcaagaattccccaccaggcacagtagctcacccccataatcccagcactttgggaaaccgaggcaggaggatcccttgagcccaggagttcaagagcagcctggacaacatagcaagaccccatctctaca

SEQ ID NO: 201 - DNA, 934 bp, Homo sapien
aacccaggaagcctcctggaagagaagcagaggatcaggttctagaaaaaagtagaatttgcagaaaggtattcagcgtatgaggaaacagagcaaagactcggagggcaagaatgtatagggctatagaatgtatacggaaggggagagkaagcacttgatttgtttggatcaaggcccatgaagggtggatkgggtctgaaggctgacaaatgcagggacacggatggggtcagctggaaaggtcgaagttgggcccaagaagacaggaactttctactgggtgaagcagccaggatcggacttcctagcccaacctgtgcttgctaagcccttcagccccatcaggctgcccatgggtgacagtctcccctgctccggagcctctcctctcactgcgctcccttctatcagcaacaccctgcttctccttaccccctcctccaggaaaccttcccagaccagtcacttgggcttccccatctctccttctcagtgcacttggggccaccctgggcacgcacactataggtgcctggacctgaggtgacaaggccattcagccggcacttactgtagggcacttcaaacacacataccagccttcctgtgatgttagataatcatcctctctgtgccagctgggaaactgaggcccagagaggtgaagggatagcccaagatccaaagcccacatgggaactttcttcctgtccattcagacacagtcacatcctccagcagaggcgtgggtgagtggtgagtggtgaggagggtgtctcctcaatccaggagaattacgtcaagaattccccaccaggcacagtagctcacccccataatcccagcactttgggaaaccgaggcaggaggatcccttgagcccaggagttcaagagcagcctggacaacatagcaagaccccatctctaca

SEQ ID NO: 202 - DNA, 621 bp, Homo sapien
ttttctacctgaatctgagatccccagtgaagaccaattctaccaccattttcctttgattattgtcatactatcagtgcctattgtgtagtaagcagttaataaaaattcacacagaattgcagttgcctttccttttctgattccatattttcctttgactcactcaagtagttcttttgtcccactgttgcttggctgttacataagacgcctttaacttcccgtttctgttcctaaaactgtgagtagtagtacaacataaggtaagcactgatttttggagtcagttttacctttagtctctaccatctaatagttgtgggacattcaacaagtgacgtccttttctcatctgtaaaatggggaacaatgatagtgctatctatatacatggttgagagggttagcatttagtaaatagtaattagtggggtttttttgtacctagagtgaccatatatcctggtttgcctggcgcaattctggtttatacctgttatcctagcatgcagtccaaggagtgcctccgtagctctgaaagttacctggtttatgtggccaccctatttataactctctggatgatgcacatgatagtgcaaatgagagcctaatttt

SEQ ID NO: 203 - DNA, 630 bp, Homo sapien
ttttctagcctgaaatctgagaatccccagttgaagacaaattcttaccacaaattttccttttgattattgtcaatactatcagtgcctattgtgtagtaagcagttaataaaaattcacacagaattgcagttgcctttccttttctgattccatattttcctttgactcactcaagtagttcttttgtcccactgttgcttggctgttacataagacgcctttaacttcccgtttctgttcctaaaactgtgagtagtagtacaacataaggtaagcactgatttttggagtcagttttacctttagtctctaccatctaatagttgtgggacattcaacaagtgacgtccttttctcatctgtaaaatggggaacaatgatagtgctatctatatacatggttgagagggttagcatttagtaaatagtaattagtggggtttttttgtacctagagtgaccatatatcctggtttgcctggcgcaattctggtttatacctgttatcctagcatgcagtccaaggagtgcctccgtagctctgaaagttacctggtttatgtggccaccctatttataactctctggatgatgcaacatgatagtgcaaatgagagcctaatttt

SEQ ID NO: 204 - DNA, 481 bp, Homo sapien
ttttctagcctgaaatctgagaatccccagttgaagacaaattcttaccacaaattttccttttgattattgtcaatactatcagtgcctattgtgtagtaagcagttaataaaaattcacacagaattgcagttgcctttccttttctgattccatattttcctttgactcactcaagtagttcttttgtcccactgttgcttggctgttacataagacgcctttaacttcccgtttctgttcctaaaactgtgagtagtagtacaacataaggtaagcactgatttttggagtcagttttacctttagtctctaccatctaatagttgtgggacattcaacaagtgacgttcctcatcccagtgacgttcctcatcccagtgacgttcctcatcccagtgacgttcctcatcccagtgacgttcctcatcccagtgacgttcctcatcccagtgacgttcctcatcccagtgacgttcc

SEQ ID NO: 205 - DNA, 846 bp, Homo sapien
tcgagcggtcgcctagtgtgctagtgaacctttccttctaacactatgacaagaatccactgcagaatctttctgcattaagcacatattggtttaatgaaaaagaaatgtttttaaccgtaatgaatgctgtaataaaagccacagaaaaattcagaatacaatacttatttttttaagttctaattaacttaacctttaaaatcattacagggattcttctgttagttcaatttctatacttttcttagaaacctttatctagaattgttagggaaatgctctatctacaaattcccaaacttgatatttcactacttcattaccaagattctcattgcttactgcttctcaattcatttagttcatcaggcttcttataaaacaagtaagtgttggggcttggtcttacacccaggcaatctgactctagagtcttatctctgaacccatttgctatccctaagcctaccaggccacaaagtgataccaaaaagtaacaattaacctagtctcctatacagcagcctcaccacacttcaccccaggtttccccccaattgtttagaatttgacttctctatagattgcctggcacactacctacggtggttcttcttcccttaccatgtgctgatcttcctcctcaccatcccagtgaaaggacttacctccaacaatacaggaaaatcagcaaaagtgcacaggagctctgccacatgctttcttctcactcggaccccattctgtttctttctcagacaactctccctccttaccacggtcaacatttgtcacttgtgctccagatggctaactccatcacctccaattgctctctgtcca

SEQ ID NO: 206 - DNA, 847 bp, Homo sapien
tcgagcggtcgcctagtgtgctagtgaacctttccttctaacactatgacaagaatccactgcagaatctttctgcattaagcacatattggtttaatgaaaaagaaatgtttttaaccgtaatgaatgctgtaataaaagccacagaaaaattcagaatacaatacttatttttttaagttctaattaacttaacctttaaaatcattacagggattcttctgttagttcaatttctatacttttcttagaaacctttatctagaattgttagggaaatgctctatctacaaattcccaaacttgatatttcactacttcattaccaagattctcattgcttactgcttctcaattcatttagttcatcaggcttcttataaaacaagtaagtgttggggcttggtcttacacccaggcaatctgactctagagtcttatctctgaacccatttgctatccctaagcctaccaggccacaaagtgataccaaaaagtaacaattaacctagtctcctatacagcagcctcaccacacttcaccccaggtttccccccaattgtttagaatttgacttctctatagattgcctggcacactacctacggtggttcttcttcccttaccatgtgctgatcttcctcctcaccatcccagtgaaaggacttacctccaacaatacaggaaaatcagcaaaagtgcacaggagctctgccacatgctttcttctcactcggaccccattctgtttctttctcagacaactctccctccttaccacggtcaacatttgtcacttgtgctccagatggctaactccatcacctccaattgctctctgtccac

SEQ ID NO: 207 - DNA, 672 bp, Homo sapien
  misc_feature (204)..(282): n=a,c,g or t
  misc_feature (860)..(897): n=a,c,g or t
atgtgagacactgacctcaggccatcctcccacctcggcctcctcctgcccagccgggcggggtcttacccaggcggagccccttacgtgcagggcgttctgtgcagtgaccgcggccctgggcagagccaaccccacgcggccacataaccgtccagggggcggggggcagcgcggtgaaatggaaaaggatttaactggggnnnnnnnnnnnnnnnnnnnnnnnnnnnnnnnnnnnnnnnnnnnnnnnnnnnnnnnnnnnnnnnnnnnnnnnnnnnnnnngttgttttgagatggaggcctcctggggcccgcaggatgcgcggccgcgggcgggtgcccggggcgggaggcgccggatgggtcgctaggcctcctccctcaggccggcctcgcgctcctaccccgcaggaccccggccgcagccctgagtcagcttccccgctcctcgcccgcccggctgcgcctgcgcggagccgcctcactgtgacccagcaagcgcgccgcctgcgagaagcgaccggacacttcgagaagggaagtggagaagcgaggagtgggcgggcctgcggggcgcggcggtgcgggattggccggatggctggtgtcgtcttcggtgcgcgccggcgccactgggccgcggcctggcgggattggccggtctgcgggtga

SEQ ID NO: 208 - DNA, 1195 bp, Homo sapien
ggggcccccccggtcgcggtaaccgcaaagatgtgtgcccccgtctggcgcttcctcacccaggggggtcgccagcccccccgggacacaccggcgtgttgcctccgctggggaaacaacaaaaacttccgggggtctcggacatcggcccagactgaaccggactgtggatccgtttgagccttgtggacccggctgagccactgctgggcttcctcggctcctcagcttgcagatggcctgtcatgggactttgtgccttgtgatggtgtgagccagttcttcataaaactttctgttcatatgtacatatatcctattagttctgtccttctgcagcaccttgactaagacaatgctgtaatctcagaatgtcttcctggaaaatacgaatcaactgacaaatgaaaacacggtgtcttcattctggcaaaacccagcagacaccaataccaccagggaattgagataaacataacccaggtagaactggctggaagcctgtgccctgacatgaggactcaggacacggcaccttctctgcagtcccgccaagaatataagatccatcctaggtgtatgagaagtctttgccctttaataaggatgggcgtctgcaaagacacattccagtttggggaaagctgaaactgtgatagtggatgagatcctggccacacgtagtttcttgattgcaagaaggctgtcatgtgcctaaaaacacgttgttttgagatggaggcctcctggggcccgcaggatgcgcggccgcgggcgggtgcccggggcgggaggcgccggatgggtcgctaggcctcctccctcaggccggcctcgcgctcctaccccgcaggaccccggccgcagccctgagtcagcttccccgctcctcgcccgcccggctgcgcctgcgcggagccgcctcactgtgacccagcaagcgcgccgcctgcgagaagcgaccggacacttcgagaagggaagtggagaagcgaggagtgggcgggcctgcggggcgcggcggtgcgggattggccggatggctggtgtcgtcttcggtgcgcgccggcgccactgggccgcggcctggcgggattggccgctacccggagccgactacggaggaggacacctgagtttacgtctcttccatctgctgctcgcctcagctgcctgggtccccgacgagagccag

SEQ ID NO: 209 - DNA, 1932 bp, Homo sapien
cgacaacgtcacccgcagaccggccaatcccgccaggccgcggcccagtggcgccggcgcgcaccgaagacgacaccagccatccggccaatcccgccccgccgcgccccgcaggcccgcccactcctcgcttctccacttcccttctcgaagtgtccggtcgcttctcgcaggcggcgcgcttgctgggtcacagtgaggcggctccgcgcaggcgcagccgggcgggcgaggagcggggaagctgactcagggctgcggccggggtcctgcggggtaggagcgcgaggccggcctgagggaggaggcctagcgacccatccggcgcctcccgccccgggcacccgcccgcggccgcgcatcctgcgggccccaggaggcctccatctcaaaacaacgtgtttttaggcacatgacagccttcttgcaatcaagaaactacgtgtggccaggatctcatccactatcacagtttcagctttccccaaactggaatgtgtctttgcagacgcccatccttattaaagggcaaagacttctcatacacctaggatggatcttatattcttggcgggactgcagagaaggtgccgtgtcctgagtcctcatgtcagggcacaggcttccagccagttctacctgggttatgtttatctcaattccctggtggtattggtgtctgctgggttttgccagaatgaagacaccgtgttttcatttgtcagttgattcgtattttccaggaagacattctgagattacagcattgtcttagtcaaggtgctgcagaaggacagaactaataggatatatgtacatatgaacagaaagttttatgaagaactggctcacaccatcacaaggcaaagtcccatgacaggccatctgcaagctgaggagcgaggaagccagcagtggctcagccggagtccaacaagcctcaaacggaatccgacagttcaggcttcagtctgtggccaaatgcccagagaccccggaaagctactggtgtaagtcccagagccgaaaggccaaagaacctggagtgtgatgtccaagggcaggaggaatggacagaagcatccagcatggggtaaagacgaaagccagaagactcagcaagctagcttacctactttcttctgcctgccttgttctagccgcgctggcagccggttggagggtgcccacccccactgagggtggatcttcctctcctagtccactgactcaaatttcagtctctctgggagcaccctcacaccagaaacaataccagccatctagccacccttcagttcaccaacacaaccattgtcttattcatgaaacttctgcagacccaccttaacctccattggtgacttctacctgaagccctctgattgttgcccagtggtgctttttaaaataatttccatagtttcttctacacctttagttggcattctactgtaaaggagagattttattttcttactcatttatttgttagtttatagtcaccaccatatggatgcagagttctgtctcattcactgggaagtattctgttgcagtcatgatttattttgatgttcacatgccagatttggtgagtgagcgccccttcacgctggctcccgagtgctgacgtgtccccgtccttctctgcacttttccttacctcctggcctcagatattccagggtcatttgttctctccctgctccaaccctgcagtcagccatctccctagggacgttggttcctttatggaaggtggcatttagaagccaggatttgggctgagcactgtggctcacgcttgtaatcccagcactttgggaggccgaagtgggcggatcgctggaggccaagagtctgagtccagcctggctaacatggtgaaacccttccccgtctctactacaaataaaaaattagctggga

SEQ ID NO: 210 - DNA, 1888 bp, Homo sapien
cgacaacgtcacccgcagaccggccaatcccgccaggccgcggcccagtggcgccggcgcgcaccgaagacgacaccagccatccggccaatcccgccccgccgcgccccgcaggcccgcccactcctcgcttctccacttcccttctcgaagtgtccggtcgcttctcgcaggcggcgcgcttgctgggtcacagtgaggcggctccgcgcaggcgcagccgggcgggcgaggagcggggaagctgactcagggctgcggccggggtcctgcggggtaggagcgcgaggccggcctgagggaggaggcctagcgacccatccggcgcctcccgccccgggcacccgcccgcggccgcgcatcctgcgggccccaggaggcctccatctcaaaacaacgtgtttttaggatctcatccactatcacagtttcagctttccccaaactggaatgtgtctttgcagacgcccatccttattaaagggcaaagacttctcatacacctaggatggatcttatattcttggcgggactgcagagaaggtgccgtgtcctgagtcctcatgtcagggcacaggcttccagccagttctacctgggttatgtttatctcaattccctggtggtattggtgtctgctgggttttgccagaatgaagacaccgtgttttcatttgtcagttgattcgtattttccaggaagacattctgagattacagcattgtcttagtcaaggtgctgcagaaggacagaactaataggatatatgtacatatgaacagaaagttttatgaagaactggctcacaccatcacaaggcaaagtcccatgacaggccatctgcaagctgaggagcgaggaagccagcagtggctcagccggagtccaacaagcctcaaacggaatccgacagttcaggcttcagtctgtggccaaatgcccagagaccccggaaagctactggtgtaagtcccagagccgaaaggccaaagaacctggagtgtgatgtccaagggcaggaggaatggacagaagcatccagcatggggtaaagacgaaagccagaagactcagcaagctagcttacctactttcttctgcctgccttgttctagccgcgctggcagccggttggagggtgcccacccccactgagggtggatcttcctctcctagtccactgactcaaatttcagtctctctgggagcaccctcacaccagaaacaataccagccatctagccacccttcagttcaccaacacaaccattgtcttattcatgaaacttctgcagacccaccttaacctccattggtgacttctacctgaagccctctgattgttgcccagtggtgctttttaaaataatttccatagtttcttctacacctttagttggcattctactgtaaaggagagattttattttcttactcatttatttgttagtttatagtcaccaccatatggatgcagagttctgtctcattcactgggaagtattctgttgcagtcatgatttattttgatgttcacatgccagatttggtgagtgagcgccccttcacgctggctcccgagtgctgacgtgtccccgtccttctctgcacttttccttacctcctggcctcagatattccagggtcatttgttctctccctgctccaaccctgcagtcagccatctccctagggacgttggttcctttatggaaggtggcatttagaagccaggatttgggctgagcactgtggctcacgcttgtaatcccagcactttgggaggccgaagtgggcggatcgctggaggccaagagtctgagtccagcctggctaacatggtgaaacccttccccgtctctactacaaataaaaaattagctggga

SEQ ID NO: 211 - DNA, 2843 bp, Homo sapien
cattcattacctcttctccgcaccgacatagatttttttagtcaagcaattttttccctttatttttgttaaataagattccagaaagtatagtgcaaacactcagtagaaaagttgcaattaagaaatgtacattcacatttaacatttcagtccattcactttttttaaaataaaaataggacaaattattcaattacttgtctcaatttaacaatcttgaaaaagactggaaggtaccctacagtgttcagttgacataaaaatagacccgtattgatcatacaaatctatcatgagaagttacccagtgagagtgagttattgtaattctgaatgtactcatcgtgtttctcacttctacagaagcatcctcagtgagttgtattgtgcgagaaaatgacacccttgcccacatcactctccattccatagagggacacaaccctatctagccaaacccagaagaacgcaggcgcttacacaacttttctcggacagtcgagaaaatccaaaagtgggctttgggcttaccttaaataggaatggaatgtaccactacgagatggtcatcataataaggacattgttgtttgagcggggggtgtgcaatcagtataaatgaggatggcggaggaagaggagtggtgactgaagggaggtggtgcataataagtgcacgagctacacaaagctcgagctacacaaagctcaggctccacgggcctcgccttggctcccagggatgctctgcagccagcgggcggatgacctgaggtcgggcctgggcctgtccctttgtgcatgcggcgtgatttcaaattcaaactaagttccacaccattaggagttttcacggcatgcagttccagagtgcaaatggcttgcatatgtgcagtttttacaggtggaaggcaagaccatacatctctcccacactgggcgtgcctcctagtggacagttgtatgcaagaggcggtgatgggctccctcaggatcccccaatgtgggaatggtcccctgagacttgtgcttcgtgtgcctggggcccagagttgggtggggggttgctggtgggaggtgagaaacaagttctggctgccgtcgggccagcttcccactgccctcacctgggaggtggatgcccacaggcaggatgctctgggctactgttgcacagtcctgcacgagatatttattcagcccacaagatttaatagatctcttgggagttcatctaggctattatgtctgtttaaacattaattctcaataagtgcctgaaagctcttttgaaagcaacctatttgaaggtctgaaccgcccggtaccagcaggaaccaatgcccaggagagggtcagagcacatgtgctctggtggttgtcaaatctctcaccatccatcataagccctctgaactcctgctgaaatcggccctttgaacatcctctaacccctgggaaggcacccggacccacctttacctcaccagcagcatatgacaataacattaaatggctctacagcagaggaagatgaaagtaaaagtagcaaatacaaccaatggccttcccatagctcacagaactcctgagcagaagctgagcagggaagaaatggtgtgtagtttcagggtgtctggaggtgccaccatttctccccatttgatgtcagagaggctttacaaaaaaataaggcaacagctcttaaggagattctgtatatttgaaattagacgcaatgacaggtttcgctcaaatatagttttagaatatagtctgatatgacaaagtagggatttttaaagcctaacattttatttccttgctggggatcagttagtaaagaaggaggaattcctcttacccaagaggaattgcattgctttaatttagcaatgtgaggtaaggcctgccagtgccagggaggacttaggcacctgctctgagggcgggcagttggagcgagtctcacccattgcggggacagccttggctgcattcagaacccacctgctgaggtggcccctccaccacttgggcactagcatgtggatgagctagagttctccatcaaaaccaacacaaatcttgcagatgttgctgttagcaaagaggcactaaacataatggaaaacacaagggcttggaactggatagagcaggaatggaaccctggtcctgcctctcagggctgtgtgactttactcaagtccccaacctctctgggcctcagattcttcactgtcaacataagtcttataatcctgcatcacttctatcctatccagtcatatctaatgtagaaaattagtttccagtgaaagtaatatgtagtgcttttatgatattttggcattctactgtaaaggagagattttattttcttactcatttatttgttagtttatagtcaccaccatatggatgcagagttctgtctcattcactgggaagtattctgttgcagtcatgatttattttgatgttcacatgccagatttggtgagtgagcgccccttcacgctggctcccgagtgctgacgtgtccccgtccttctctgcacttttccttacctcctggcctcagatattccagggtcatttgttctctccctgctccaaccctgcagtcagccatctccctagggacgttggttcctttatggaaggtggcatttagaagccaggatttgggctgagcactgtggctcacgcttgtaatcccagcactttgggaggccgaagtgggcggatcgctggaggccaagagtctgagtccagcctggctaacatggtgaaacccttccccgtctctactacaaataaaaaattagctggga

SEQ ID NO: 212 - DNA, 3199 bp, Homo sapien
ttaggagcaatgttttgcaggcaggtggtggatctcataaagtacattctcaagggtggggagaattacaaagaaccttcttaagggtagaggagattacaaagtacattgatcagttaggatggggcagaaacaaattacaagggtggaatgtcatcagttaaggctgttttcacttcttttgtggatcttcagttgcttcaggccatctggatgtatacatgcaggtcactggggatatgatggcttagcttgggctcagaggcctgacaggagttcaagaccagcctggtgaacatgacgaaaccctgtctctacaaaaataagaaatgaacgcagcatggtggcatgcacctgcagtcccagcctcttgggaggtggaggcattagtcagctgtgaatgtgccctgcactagagcctgggcagcagagcagacccttcctcaaacccaaaaagcgtcatgccaaccagaccagatggtcgcctaatcaatagagaccacgcccaatcaggtaaggacagacacaaccaggcatgctctttcttgttttgttttttgtttgttgttttgagatggagtttcactcttgttgcccaggctggagtgcagtggtgtgatctcggctcaccggaaccaccacctcctgggttcaagcgattctcctgcctcagcctcccaagtagctgggattacaggcatgcaccaccaggcccggctaattttgtatttttagtagagacgggggtgtctccatattggtcaggctggtctcgaactcccaacctcaggtgatctgcctgcctcggcctcccaaagtactgggattacaggcgtgagccactgcgcccagcttgttgtttttctttagacagtgtcttcctctgtggctcaggctgaagggcactgggatgatcacagctcactgcagcttccacctcccaggctcaagccatccttcttcctcaggctcctgagtagcgggagctacaggcatgcgccatcatgcctggctaatttttgtattttttgtagatacagggttttgctatgtagcccaggctggtcttgaactcctgacctcaggtgatccctctgcctcagcttcccaaagcgctgggattacagaacatgagccactgtgcccggcttattgtacagtctttactctcggttttcaccagagaactcaagggctgtgaaaagagcaggacctcaccagctgcacggcggtggtgactggctccatcttgctgtccctcccaatcacacaacatctccccttgaaggctctgcccaggcccggactcccacctttcaagatgtctgggtcagtgcaggacctcctccttggccacatcgctctccttggactggttcaagtgattctcccacctcagcctcccaagtaggattacagtgttgactcacctgtggagtggtctgagcctgaatgcccggggctgtggccaccgagtgaacgggctgtgctaaggggaattgccaccttgggaaccctgtgtagttacggcttttctgattaagtatcaataaaagtctgaccttgtgaaaaaagcaaacgtgagtggccctgcttatgtttcaccttgcgttgctcagtgatagttctgcaaagtcgcaggaaacctggaatcatctaattatcgtgagtgttggcacatgacagccttcttgcaatcaagaaactacgtgtggccaggatctcatccactatcacagtttcagctttccccaaactggaatgtgtctttgcagacgcccatccttattaaagggcaaagacttctcatacacctaggatggatcttatattcttggcgggactgcagagaaggtgccgtgtcctgagtcctcatgtcagggcacaggcttccagccagttctacctgggttatgtttatctcaattccctggtggtattggtgtctgctgggttttgccagaatgaagacaccgtgttttcatttgtcagttgattcgtattttccaggaagacattctgagattacagcattgtcttagtcaaggtgctgcagaaggacagaactaataggatatatgtacatatgaacagaaagttttatgaagaactggctcacaccatcacaaggcaaagtcccatgacaggccatctgcaagctgaggagcgaggaagccagcagtggctcagccggagtccaacaagcctcaaacggaatccgacagttcaggcttcagtctgtggccaaatgcccagagaccccggaaagctactggtgtaagtcccagagccgaaaggccaaagaacctggagtgtgatgtccaagggcaggaggaatggacagaagcatccagcatggggtaaagacgaaagccagaagactcagcaagctagcttacctactttcttctgcctgccttgttctagccgcgctggcagccggttggagggtgcccacccccactgagggtggatcttcctctcctagtccactgactcaaatttcagtctctctgggagcaccctcacaccagaaacaataccagccatctagccacccttcagttcaccaacacaaccattgtcttattcatgaaacttctgcagacccaccttaacctccattggtgacttctacctgaagccctctgattgttgcccagtggtgctttttaaaataatttccatagtttcttctacacctttagttggcattctactgtaaaggagagattttattttcttactcatttatttgttagtttatagtcaccaccatatggatgcagagttctgtctcattcactgggaagtattctgttgcagtcatgatttattttgatgttcacatgccagatttggtgagtgagcgccccttcacgctggctcccgagtgctgacgtgtccccgtccttctctgcacttttccttacctcctggcctcagatattccagggtcatttgttctctccctgctccaaccctgcagtcagccatctccctagggacgttggttcctttatggaaggtggcatttagaagccaggatttgggctgagcactgtggctcacgcttgtaatcccagcactttgggaggccgaagtgggcggatcgctggaggccaagagtctgagtccagcctggctaacatggtgaaacccttccccgtctctactacaaataaaaaattagctggga

SEQ ID NO: 213 - DNA, 2188 bp, Homo sapien
cgacaacgtcacccgcagaccggccaatcccgccaggccgcggcccagtggcgccggcgcgcaccgaagacgacaccagccatccggccaatcccgccccgccgcgccccgcaggcccgcccactcctcgcttctccacttcccttctcgaagtgtccggtcgcttctcgcaggcggcgcgcttgctgggtcacagtgaggcggctccgcgcaggcgcagccgggcgggcgaggagcggggaagctgactcagggctgcggccggggtcctgcggggtaggagcgcgaggccggcctgagggaggaggcctagcgacccatccggcgcctcccgccccgggcacccgcccgcggccgcgcatcctgcgggccccaggaggcctccatctcaaaacaacgtgtttttagtgttgactcacctgtggagtggtctgagcctgaatgcccggggctgtggccaccgagtgaacgggctgtgctaaggggaattgccaccttgggaaccctgtgtagttacggcttttctgattaagtatcaataaaagtctgaccttgtgaaaaaagcaaacgtgagtggccctgcttatgtttcaccttgcgttgctcagtgatagttctgcaaagtcgcaggaaacctggaatcatctaattatcgtgagtgttggcacatgacagccttcttgcaatcaagaaactacgtgtggccaggatctcatccactatcacagtttcagctttccccaaactggaatgtgtctttgcagacgcccatccttattaaagggcaaagacttctcatacacctaggatggatcttatattcttggcgggactgcagagaaggtgccgtgtcctgagtcctcatgtcagggcacaggcttccagccagttctacctgggttatgtttatctcaattccctggtggtattggtgtctgctgggttttgccagaatgaagacaccgtgttttcatttgtcagttgattcgtattttccaggaagacattctgagattacagcattgtcttagtcaaggtgctgcagaaggacagaactaataggatatatgtacatatgaacagaaagttttatgaagaactggctcacaccatcacaaggcaaagtcccatgacaggccatctgcaagctgaggagcgaggaagccagcagtggctcagccggagtccaacaagcctcaaacggaatccgacagttcaggcttcagtctgtggccaaatgcccagagaccccggaaagctactggtgtaagtcccagagccgaaaggccaaagaacctggagtgtgatgtccaagggcaggaggaatggacagaagcatccagcatggggtaaagacgaaagccagaagactcagcaagctagcttacctactttcttctgcctgccttgttctagccgcgctggcagccggttggagggtgcccacccccactgagggtggatcttcctctcctagtccactgactcaaatttcagtctctctgggagcaccctcacaccagaaacaataccagccatctagccacccttcagttcaccaacacaaccattgtcttattcatgaaacttctgcagacccaccttaacctccattggtgacttctacctgaagccctctgattgttgcccagtggtgctttttaaaataatttccatagtttcttctacacctttagttggcattctactgtaaaggagagattttattttcttactcatttatttgttagtttatagtcaccaccatatggatgcagagttctgtctcattcactgggaagtattctgttgcagtcatgatttattttgatgttcacatgccagatttggtgagtgagcgccccttcacgctggctcccgagtgctgacgtgtccccgtccttctctgcacttttccttacctcctggcctcagatattccagggtcatttgttctctccctgctccaaccctgcagtcagccatctccctagggacgttggttcctttatggaaggtggcatttagaagccaggatttgggctgagcactgtggctcacgcttgtaatcccagcactttgggaggccgaagtgggcggatcgctggaggccaagagtctgagtccagcctggctaacatggtgaaacccttccccgtctctactacaaataaaaaattagctggga

SEQ ID NO: 214 - DNA, 1577 bp, Homo sapien
ctctgtcactcatgcctgactgaagttgatcagcacgtctttttctcccttaggcacatgacagccttcttgcaatcaagaaactacgtgtggccaggatctcatccactatcacagtttcagctttccccaaactggaatgtgtctttgcagacgcccatccttattaaagggcaaagacttctcatacacctaggatggatcttatattcttggcgggactgcagagaaggtgccgtgtcctgagtcctcatgtcagggcacaggcttccagccagttctacctgggttatgtttatctcaattccctggtggtattggtgtctgctgggttttgccagaatgaagacaccgtgttttcatttgtcagttgattcgtattttccaggaagacattctgagattacagcattgtcttagtcaaggtgctgcagaaggacagaactaataggatatatgtacatatgaacagaaagttttatgaagaactggctcacaccatcacaaggcaaagtcccatgacaggccatctgcaagctgaggagcgaggaagccagcagtggctcagccggagtccaacaagcctcaaacggaatccgacagttcaggcttcagtctgtggccaaatgcccagagaccccggaaagctactggtgtaagtcccagagccgaaaggccaaagaacctggagtgtgatgtccaagggcaggaggaatggacagaagcatccagcatggggtaaagacgaaagccagaagactcagcaagctagcttacctactttcttctgcctgccttgttctagccgcgctggcagccggttggagggtgcccacccccactgagggtggatcttcctctcctagtccactgactcaaatttcagtctctctgggagcaccctcacaccagaaacaataccagccatctagccacccttcagttcaccaacacaaccattgtcttattcatgaaacttctgcagacccaccttaacctccattggtgacttctacctgaagccctctgattgttgcccagtggtgctttttaaaataatttccatagtttcttctacacctttagttggcattctactgtaaaggagagattttattttcttactcatttatttgttagtttatagtcaccaccatatggatgcagagttctgtctcattcactgggaagtattctgttgcagtcatgatttattttgatgttcacatgccagatttggtgagtgagcgccccttcacgctggctcccgagtgctgacgtgtccccgtccttctctgcacttttccttacctcctggcctcagatattccagggtcatttgttctctccctgctccaaccctgcagtcagccatctccctagggacgttggttcctttatggaaggtggcatttagaagccaggatttgggctgagcactgtggctcacgcttgtaatcccagcactttgggaggccgaagtgggcggatcgctggaggccaagagtctgagtccagcctggctaacatggtgaaacccttccccgtctctactacaaataaaaaattagctggga

SEQ ID NO: 215 - DNA, 1784 bp, Homo sapien
ttaggagcaatgttttgcaggcaggtggtggatctcataaagtacattctcaagggtggggagaattacaaagaaccttcttaagggtagaggagattacaaagtacattgatcagttaggatggggcagaaacaaattacaagggtggaatgtcatcagttaaggctgttttcacttcttttgtggatcttcagttgcttcaggccatctggatgtatacatgcaggtcactggggatatgatggcttagcttgggctcagaggcctgacaggagttcaagaccagcctggtgaacatgacgaaaccctgtctctacaaaaataagaaatgaacgcagcatggtggcatgcacctgcagtcccagcctcttgggaggtggaggcattagtcagctgtgaatgtgccctgcactagagcctgggcagcagagcagacccttcctcaaacccaaaaagcgtcatgccaaccagaccagatggtcgcctaatcaatagagaccacgcccaatcaggtaaggacagacacaaccaggcatgctctttcttgttttgttttttgtttgttgttttgagatggagtttcactcttgttgcccaggctggagtgcagtggtgtgatctcggctcaccggaaccaccacctcctgggttcaagcgattctcctgcctcagcctcccaagtagctgggattacaggcatgcaccaccaggcccggctaattttgtatttttagtagagacgggggtgtctccatattggtcaggctggtctcgaactcccaacctcaggtgatctgcctgcctcggcctcccaaagtactgggattacaggcgtgagccactgcgcccagcttgttgtttttctttagacagtgtcttcctctgtggctcaggctgaagggcactgggatgatcacagctcactgcagcttccacctcccaggctcaagccatccttcttcctcaggctcctgagtagcgggagctacaggcatgcgccatcatgcctggctaatttttgtattttttgtagatacagggttttgctatgtagcccaggctggtcttgaactcctgacctcaggtgatccctctgcctcagcttcccaaagcgctgggattacagaacatgagccactgtgcccggcttattgtacagtctttactctcggttttcaccagagaactcaagggctgtgaaaagagcaggacctcaccagctgcacggcggtggtgactggctccatcttgctgtccctcccaatcacacaacatctccccttgaaggctctgcccaggcccggactcccacctttcaagatgtctgggtcagtgcaggacctcctccttggccacatcgctctccttggactggttcaagtgattctcccacctcagcctcccaagtaggattacagtgttgactcacctgtggagtggtctgagcctgaatgcccggggctgtggccaccgagtgaacgggctgtgctaaggggaattgccaccttgggaaccctgtgtagttacggcttttctgattaagtatcaataaaagtctgaccttgtgaaaaaagcaaacgtgagtggccctgcttatgtttcaccttgcgttgctcagtgatagttctgcaaagtcgcaggaaacctggaatcatctaattatcgtgagtgttggtgagtaacacccataggcactggctcccggggaaatacagagtcaggttcctccgagccgctggccacagcatttttgttaagcagttcatcgttaaccttcttgtac

SEQ ID NO: 216 - DNA, 680 bp, Homo sapien
cgacaacgtcacccgcagaccggccaatcccgccaggccgcggcccagtggcgccggcgcgcaccgaagacgacaccagccatccggccaatcccgccccgccgcgccccgcaggcccgcccactcctcgcttctccacttcccttctcgaagtgtccggtcgcttctcgcaggcggcgcgcttgctgggtcacagtgaggcggctccgcgcaggcgcagccgggcgggcgaggagcggggaagctgactcagggctgcggccggggtcctgcggggtaggagcgcgaggccggcctgagggaggaggcctagcgacccatccggcgcctcccgccccgggcacccgcccgcggccgcgcatcctgcgggccccaggaggcctccatctcaaaacaacgtgtttttaggtaatttcaaacttagggaaaagcttcaagaataataccgaaaatgtcagtgtccccagcacctagatcccccagttaaatccttttccatttcaccgcgctgccccccgccccctggacggttatgtggccgcgtggggttggctctgcccagggccgcggtcactgcacagaacgccctgcacgtaaggggctccgcctgggtaagaccccgcccggctgggcaggaggaggccgaggtgggaggatggcctgaggtcagtgtctcacat

SEQ ID NO: 217 - DNA, 692 bp, Homo sapien
ctcacatactcccaattaaaagtcgtgtgaaagctacacaggattacagaggcatctatattatcacttttgctctttgactaatcctatgctgtttttgttatagagagaaacaaggacatggatgaagtgatttttttttaaagtaaaaggacaaatttgccacacaacagaacaatctgagtatgatctgtcctcagggtatctttatatcctttccatgtgaaagagatataaagaattctgacagcaaaactactttaaaaatcaaatcaaatcaaatccacaagcacactcccattcctcccctgccgcaatggttcttgctctcaatgtttagtagagaaattaagagccacattcaaagatggaaaataagatttgtcattagaagcttgccaaggtaacagattgtacaacttgagatgaattcatgttgtttaagaagttcagaaaggttggaagatgggtttataaataaagaagtggagtccattgaaagcctggttctttgattcttttccagtgaggtgatttataatctcttctagagaagaagcttttcctaagagttttaagcatacaccacacacacacagagacgtatagacatatatttacatataaatatatcactccttttctgtacgttctgtctgaagcagggtcagtaatgtgtgacccaaatgtca

SEQ ID NO: 218 - DNA, 668 bp, Homo sapien
gtgtgaaagctacacaggattacagaggcatctatattatcacttttgctctttgactaatcctatgctgtttttgttatagagagaaacaaggacatggatgaagtgattttttttttaaataaaaggacaaatttgccacacaacagaacaatctgagtatgatctgtcctcagggtatctttatatcctttccatgtgaaagagatataaagaattctgacagcaaaactactttaaaaatcaaatcaaatcaaatccacaagcacactcccattcctcccctgccgcaatggttcttgctctcaatgtttagtagagaaattaagagccacattcaaagatggaaaataagatttgtcattagaagcttgccaaggtaacagattgtacaacttgagatgaattcatgttgtttaagaagttcagaaaggttggaagatgggtttataaataaagaagtggagtccattgaaagcctggttctttgattcttttccagtgaggtgatttataatctcttctagagaagaagcttttcctaagagttttaagcatacaccacacacacacagagacgtatagacatatatttacatataaatatatcactccttttctgtacgttctgtctgaagcagggtcagtaatgtgtgacccaaatgtca

SEQ ID NO: 219 - DNA, 470 bp, Homo sapien
gtgtgaaagctacacaggattacagaggcatctatattatcacttttgctctttgactaatcctatgctgtttttgttatagagagaaacaaggacatggatgaagtgattttttttttaaataaaaggacaaatttgccacacaacagaacaatctgagtatgatctgtcctcagggtatctttatatcctttccatgtgaaagagatataaagaattctgacagcaaaactactttaaaaatcaaatcaaatcaaatccacaagcacactcccattcctcccctgccgcaatggttcttgctctcaatgtttagtagagaaattaagagccacattcaaagatggaaaataagatttgtcattagaagcttgccaaggtaacagattgtacaacttgagatgaattcatgttgtttaagaagttcagaaaggttggaagatgggtttataaataaagaagtggagtcc

SEQ ID NO: 220 - DNA, 966 bp, Homo sapien
  misc_feature (860)..(897): n=a,c,g and t
cagaggttagctaactttttctataaaggaccagataatagacacttcaggctttgtgggccatacagcttctgtagggtgaaagcagccttagacaataggcaactaatgaggatggctgtgctcccatatggacgctgagatgtgagtattatatagttttttatatgccctggagtatcattcctctttatttttttagccatttaaaaatgtaaaaaccattcttagctcacgggctttagaagaacaggcggtgggctggatttgattagcgggccatagtttgctgacccttgtgatagatgataactcatttaatttattttgactattttcctcacttccttttttagataaattttttaggcctacagaagtttgaatttcttacaacatcaaattttaaatttctgaccatttttgtcatgattctgaaagttagaatgttcttactaacgatcatatccaaaaatacacgacttaattttagcttcggagacaatgttttttaaagaattcgcttttattcatgtggaatctagttgtgtatagtgtgatttggaggtctaaatttaatttttttgcaagcagcaaaccaattgtgggttgtttttgaatcctcctggttagtactgggttcactaactgtgctttgggtacctttgattctagatttacagcatgataattttcccacttttcatttatgttcaagaagtatggtaccaaactgtgacatgagttcctcttagttcttcttggctcatctgtttccatatgagctggcattcacaggaaattcagaactcttacaggcataatattaatagatacatgtggaaagagttgttctctgnnnnnnnnnnnnnnnnnnnnnnnnnnnnnnnnnnnnnntgacaactgtgatctcccacactaggaaagaaaagtgcaattaatagttatatattacataacattaac

SEQ ID NO: 221 - DNA, 839 bp, Homo sapien
cagaggttagctaactttttctataaaggaccagataatagacacttcaggctttgtgggccatacagcttctgtagggtgaaagcagccttagacaataggcaactaatgaggatggctgtgctcccatatggacgctgagatgtgagtattatatagttttttatatgccctggagtatcattcctctttatttttttagccatttaaaaatgtaaaaaccattcttagctcacgggctgtagaagaacaggcggtgggctggatttgattagcgggccatagtttgctgacccttgtaatagatgataactcatttaatttattttgactattttcctcacttccttttttagataaattttttaggcctacagaagtttgaatttcttacaacatcaaattttaaatttctgaccatttttgtcatgattctgaaagttagaatgttcttactaacgatcatatccaaaaatacacgacttaattttagcttcggagacaatgttttttaaagaattcgcttttattcatgtggaatctagttgtgtatagtgtgatttggaggtctaaatttaatttttttgcaagcagcaaaccaattgtgggttgtttttgaatcctcctggttagtactgggttcactaactgtgctttgggtacctttgattctagatttacagcatgataattttcccacttttcatttatgttcaagaagtatggtaccaaactgtgacatgagttcctcttagttcttcttggctcatctgtttccatatgagctggcattcacaggaaattcagaactcttacaggcataatattaatagatacat

SEQ ID NO: 222 - DNA, 380 bp, Homo sapien
attgcaatttcttaatgtgagatagtaagttccagctctgtttctttcaacttctttcagcatccgcatcaagtggcacagccaaaagcctccttctgtggaatccccttgccttctggcagtcatcttgggtaggataccaggaagatgtcccaagccatctgtggtgcctaagttttggaaatttgcatatctttgctgtatcaaattatgggcatttaagctattgtactgttgtccctctttctgccagttctctcaagttataatggcagatcaaatattcattgcctaatctagtatttctcaaagcctggtctctagactggaatattagtatcacctggaaatttgttagacatgtaaaatttttgggccca

SEQ ID NO: 223 - DNA, 380 bp, Homo sapien; identical to SEQ ID NO: 222

SEQ ID NO: 224 - DNA, 1103 bp, Homo sapien
  misc_feature (539)..(539): n=a,c,g or t
caacccctacctgcttttacctttttaaatgattcctctttgtaaaatgcatactgtcatttatattgtgttatttcctatgcaatagaaaaaacaaacacatacaaacatttttgtctatttttgttgttagaacaataaaatgtccaccactttgtaatgcacagtgtttacattaatatcacacagattgatttcacatgtgtgaagtgttgacagctaaatccaaacagaggcacactcagtacagtagataaaaggataactttaaggtactggcttccatcaaagatatgtaaggcagctcaatatatataaatgagatgaaatcaattattcaaggtgtgtggtactaaatggcttaagaaatggttgacttaaaaaagagatacagtttattttggtctgaggtttgaattgcaaagaagaataagaagttgaagttgtgcttctgagtcttttggcaattgggatgtgtgttggcctgtcatcagctgtttggtccatgtgtagacaccatgagctctgatcttcagggnagaaggggttggctatgtcaatatgaaaatacacattctgctggggaccagaaaggagggacagcagggtatagtgaaagagtgctaagcttacaggcaaatagcccaggtttaaaatcagggctcaaccacctgattctctatgcctctgggcaagtgacataaggtccctcacttgccccatctgtaaaatcgggtaataacagccaacttgctggacacagaataagactgtgttcacttgattttaaaaaaccctcttgataaatgaagattctctactgtttctattagtcatatgtcttgcacaactcatactcatccaaaatgatcttgtttttcaatcatgaaggaacccaattccctaaggctcctggggtcttactataatagaactttaatggaaaagacgagttttctactttttacagtatgtttttaaagaggcttttctatctctgtactgaactttccagtcctgtttttcctgtggagtgaaataatgacattatggacaaaagaagaaaaagaaaagggggagaacagaagagatgaagggcacgc

SEQ ID NO: 225 - DNA, 1103 bp, Homo sapien
caacccctaccttgcttttacctttttaaatgattcctcttttgtaaaatgcatactgtcatttatattgtgttatttcctatgcaatagaaaaaacaaacacatacaaacatttttgtctatttttgttgttagaacaataaaatgtccaccactttgtaatgcacagtgtttacattaatatcacacagattgatttcacatgtgtgaagtgttgacagctaaatccaaacagaggcacactcagtacagtagataaaaggataactttaaggtactggcttccatcaaagatatgtaaggcagctcaatatatataaatgagatgaaatcaattattcaaggtgtgtggtactaaatggcttaagaaatggttgacttaaaaaagagatacagtttattttggtctgaggtttgaattgcaaagaagaataagaagttgaagttgtgcttctgagtcttttggcaattgggatgtgtgttggcctgtcatcagctgtttggtccatgtgtagacaccatgagctctgatcttcagggagaaggggttggctatgtcaatatgaaaatacacattctgctggggaccagaaaggagggacagcagggtatagtgaaagagtgctaagcttacaggcaaatagcccaggtttaaaatcagggctcaaccacctgattctctatgcctctgggcaagtgacataaggtccctcacttgccccatctgtaaaatcgggtaataacagccaacttgctggacacagaataagactgtgttcacttgattttaaaaaaccctcttgataaatgaagattctctactgtttctattagtcatatgtcttgcacaactcatactcatccaaaatgatcttgtttttcaatcatgaaggaacccaattccctaaggctcctggggtcttactataatagaactttaatggaaaagacgagttttctactttttacagtatgtttttaaagaggcttttctatctctgtactgaactttccagtcctgtttttcctgtggagtgaaataatgacattatggacaaaagaagaaaaagaaaagggggagaacagaagagatgaagggacaa

SEQ ID NO: 226 - DNA, 824 bp, Homo sapien
  misc_feature (269)..(381): n=a,c,g or t
gacagatgcctgtggccctgctaatgactgaggccctgctaatgactgaaggtgcgtgcagggagctgtggttagcatcgtcaaggagacaggacacatgtgcaggaaggaagcagccagaagtctgaggaaaccagtttcgaaagttgatttgcacacaatagaaatgttcatagggagaaagccacatgggccgcagtcgttgatactgtggtcatggtaataatgacgatgacacgaaccatggcagtagctgacctttattgaannnnnnnnnnnnnnnnnnnnnnnnnnnnnnnnnnnnnnnnnnnnnnnnnnnnnnnnnnnnnnnnnnnnnnnnnnnnnnnnnnnnnnnnnnnnnnnnnnnnnnnnnnnnnnnnnacagagtttaaataatgtgcccaagatcacacagcaagtaaatgccggctagtcaggacacacacccaggccacccaatgtcagagccagtatgtgcccactgaggcacgctgcctccaagtcagagtgtacaagttcaaaatacagattctttgtgagttacacctatggagaatattttcaactgataaatcaaaccatgatcaacaaatagatattgagcaaatctacctggtctctagaatgagtttccaagttattactgcttcctaccttttggtctccaaatgtgtaaaacagggagaaatgacaaaagccaccatgactgtgtccagggcagacccactgtgcacccagaccttaccgatatgcgcttgtggaatgcaaacttcatttgattatcagcctcagtgaatcctcattagagaggtaaaaagaattca

SEQ ID NO: 227 - DNA, 1328 bp, Homo sapien
cggacgcgtgggcgacccacgcgtccgggattaaagatgatttgcattctttatgagcctctcatggtccagctacacctcaactgatgcgtaggtgtggaagatatggcgttgttacgtgactttccttttctttcagattaaaggatcctggtcaaataaaagaggtaaagaaaattacaatccctacagctacggaaatatctttaccaactgctgtgttgccctgtgtgggcccatctcaccaaggtaagactcaggacgcatcgtgctcttcaacagaccttggaaaaccgaatgcctcggccgttagcacaggccgcccgccccggtggaatgggtcgccgccaccacgtgaccactttgtgccgcgtggatgtggccttcgtgaaatcgagatctggctgtttgtcgtgtcacacttcacaccttttttgatcttcaattgaatctgtgtctgattggggggaaatttcctaaagcccaaaatagagagacagatgcctgtggccctgctaatgactgaggccctgctaatgactgaaggtgcgtgcagggagctgtggttagcatcgtcaaggagacaggacacatgtgcaggaaggaagcagccagaagtctgaggaaaccagtttcgaaagttgatttgcacacaatagaaatgttcatagggagaaagccacatgggccgcagtcgttgatactgtggtcatggtaataatgacgatgacacgaaccatggcagtagctgacctttattgaatctgtgttaagctctgctctaagttctttatctgcattagcctttcacaagctcactctgtacctataggtaggcaccgttatatcccattctatggatgaggaaagtgaggcacagagtttaaataatgtgcccaagatcacacagcaagtaaatgccggctagtcaggacacacacccaggccacccaatgtcagagccagtatgtgcccactgaggcacgctgcctccaagtcagagtgtacaagttcaaaatacagattctttgtgagttacacctatggagaatattttcaactgataaatcaaaccatgatcaacaaatagatattgagcaaatctacctggtctctagaatgagtttccaagttattactgcttcctaccttttggtctccaaatgtgtaaaacagggagaaatgacaaaagccaccatgactgtgtccagggcagacccactgtgcacccagaccttaccgatatgcgcttgtggaatgcaaacttcatttgattatcagcctcagtgaatcctcattagagaggtaaaaagaattcaaaaaaaaaa

SEQ ID NO: 228 - DNA, 520 bp, Homo sapien
ggtggaatgggtcgccgccaccacgtgaccactttgtgccgcgtggatgtggccttcgtgaaatcgagatctggctgtttgtcgtgtcacacttcacaccttttttgatcttcaattgaatctgtgtctgattggggggaaatttcctaaagcccaaaatagagagacagatgcctgtggccctgctaatgactgaggccctgctaatgactgaaggtgcgtgcagggagctgtggttagcatcgtcaaggagacaggacacatgtgcaggaaggaagcagccagaagtctgaggaaaccagtttcgaaagttgatttgcacacaatagaaatgttcatagggagaaagccacatgggccgcagtcgttgatactgtggtcatggtaataatgacgatgacacgaaccatggcagtagctgacctttattgaatctgtgttaagctctgctctaagttctttatctgcattagcctttcacaagctcactctgtacctataggtaggcaccgttatatcc

SEQ ID NO: 229 - DNA, 1328 bp, Homo sapien
cggacgcgtgggcgacccacgcgtccgggattaaagatgatttgcattctttatgagcctctcatggtccagctacacctcaactgatgcgtaggtgtggaagatatggcgttgttacgtgactttccttttctttcagattaaaggatcctggtcaaataaaagaggtaaagaaaattacaatccctacagctacggaaatatctttaccaactgctgtgttgccctgtgtgggcccatctcaccaaggtaagactcaggacgcatcgtgctcttcaacagaccttggaaaaccgaatgcctcggccgttagcacaggccgcccgccccggtggaatgggtcgccgccaccacgtgaccactttgtgccgcgtggatgtggccttcgtgaaatcgagatctggctgtttgtcgtgtcacacttcacaccttttttgatcttcaattgaatctgtgtctgattggggggaaatttcctaaagcccaaaatagagagacagatgcctgtggccctgctaatgactgaggccctgctaatgactgaaggtgcgtgcagggagctgtggttagcatcgtcaaggagacaggacacatgtgcaggaaggaagcagccagaagtctgaggaaaccagtttcgaaagttgatttgcacacaatagaaatgttcatagggagaaagccacatgggccgcagtcgttgatactgtggtcatggtaataatgacgatgacacgaaccatggcagtagctgacctttattgaatctgtgttaagctctgctctaagttctttatctgcattagcctttcacaagctcactctgtacctataggtaggcaccgttatatcccattctatggatgaggaaagtgaggcacagagtttaaataatgtgcccaagatcacacagcaagtaaatgccggctagtcaggacacacacccaggccacccaatgtcagagccagtatgtgcccactgaggcacgctgcctccaagtcagagtgtacaagttcaaaatacagattctttgtgagttacacctatggagaatattttcaactgataaatcaaaccatgatcaacaaatagatattgagcaaatctacctggtctctagaatgagtttccaagttattactgcttcctaccttttggtctccaaatgtgtaaaacagggagaaatgacaaaagccaccatgactgtgtccagggcagacccactgtgcacccagaccttaccgatatgtgcttgtggaatgcaaacttcatttgattatcagcctcagtgaatcctcattagagaggtaaaaagaattcaaaaaaaaaa

SEQ ID NO: 230 - DNA, 1324 bp, Homo sapien
cggacgcgtgggcgacccacgcgtccgggattaaagatgatttgcattctttatgagcctctcatggtccagctcacctcaactgtgcgttggtgtggaagatattgcttgttactgactttccttttctttcagattaaaggatcctggtcaaataaaagaggtaaagaaaattacaatccctacagctacggaaatatctttaccaactgctgtgttgccctgtgtgggcccatctcaccaaggtaagactcaggacgcatcgtgctcttcaacagaccttggaaaaccgaatgcctcggccgttagcacaggccgcccgccccggtggaatgggtcgccgccaccacgtgaccactttgtgccgcgtggatgtggccttcgtgaaatcgagatctggctgtttgtcgtgtcacacttcacaccttttttgatcttcaattgaatctgtgtctgattggggggaaatttcctaaagcccaaaatagagagacagatgcctgtggccctgctaatgactgaggccctgctaatgactgaaggtgcgtgcagggagctgtggttagcatcgtcaaggagacaggacacatgtgcaggaaggaagcagccagaagtctgaggaaaccagtttcgaaagttgatttgcacacaatagaaatgttcatagggagaaagccacatgggccgcagtcgttgatactgtggtcatggtaataatgacgatgacacgaaccatggcagtagctgacctttattgaatctgtgttaagctctgctctaagttctttatctgcattagcctttcacaagctcactctgtacctataggtaggcaccgttatatcccattctatggatgaggaaagtgaggcacagagtttaaataatgtgcccaagatcacacagcaagtaaatgccggctagtcaggacacacacccaggccacccaatgtcagagccagtatgtgcccactgaggcacgctgcctccaagtcagagtgtacaagttcaaaatacagattctttgtgagttacacctatggagaatattttcaactgataaatcaaaccatgatcaacaaatagatattgagcaaatctacctggtctctagaatgagtttccaagttattactgcttcctaccttttggtctccaaatgtgtaaaacagggagaaatgacaaaagccaccatgactgtgtccagggcagacccactgtgcacccagaccttaccgatatgcgcttgtggaatgcaaacttcatttgattatcagcctcagtgaatcctcattagagaggtaaaaagaattcaagaaaaaaa

SEQ ID NO: 231 - DNA, 1750 bp, Homo sapien
gctggatgggcccaaaagtgccaggccaggctgcagtcctggagggaacctggcagggtcagggcagggatgtggttacttccactggcatcatgtcaggatggaggggcagcctgccagcagggggaagagtctctaatgccaggtggggctgttgctgctctgtcccctctggggctaaattgagggcctgctgagccatccttcatttgcggggaggaaagggaagcagaggctggaggccaggctgaatctgacatctaactcaatttccttctcagtgtgggatagtcctgtctcctccaaagaagattttaaagtacatcagtgttcccctgcccccaccaagatagaataatgggagtaattactgatgctccagaaacagcttgaataagtactcttccttctgggccaggaagactgtgaagatgtcttataagaacacagttgattgtatcaaattaaaatgtttcttattttgtaatacattttgccattcttacttattttccattttttgcttagagaaaggaattctgtcgttataatgactcctctgaaacgatggcttattgcatctccactgaccagtacaagagaagaggaaaagctctatgtgtctgacagtaaacattaagtggggatttagcttgctcatttccacgacatccacagttaggttaattcagtctccaaagaaaaatgattttacttgaaatgtctggtcgtatacatggatcaaaataattaagacgtttatgaagctctgcaattttctggaggggacctgcatgactgttttccagaaagttatcagatcttgctttcctgattagcagcagttagcggggtggataaaagcaccccttcagagcaatctcatttccatttctttcaggccacttattttttccaactttttttccgtatcttcataaatgtttcactcttcttttgttagtatttcttagtctcttgagtcaagaaatatttactgagtatgattgcatgcataagtagtgtgcgttagagatacgatacctgtaagacaccacagtgctgggtagatccgggtgccattgtctgttgccagggccgaagttggcattttgtaagtgttcgaataagcaccatgccgtgggataagaaataaaagtgtgtgcctcatctgtcatctgtagttgtgtatatatgccctgtcttcgggcgggcttaggtctcttctcataatttgtgcctttttgctcataacagtctggtttcaaagacacaaaacagttgttgttattgtacttagatgaagaatacagagctcctagaaggttgatgagttcatgaagaagaaggctctggaaccaggatccctcaccttggtggacttcccaccactggagcggcttccctgccggaccagggttgaccccggcaagggctctcccaggcgcacattcctttgcacattgcagctgttgggagaccgtacgtgatctcaccattctccatggcccctttccatagaccaggctggctgggtggctctgatcctgatgccccacatggcactttctgcaggtgcaggtccaaggtgggcctgcagcaaggactggtcagattactttgaaaggggacagggaggatgacatttggggcaaggagagttttactcagaaccatttgtgttgtcaccatcagggctggattaaaacctttcaaaagccatcaacactgagaagtgtatggtaacctc

SEQ ID NO: 232 - DNA, 6150 bp, Homo sapien
ctcagtcacgtggcccctgcacgtgtgcaacgaaggaggccggggtcccagcggaggatatcgcaaacggcaccagttcaggggggtaccgcccgcctcccagaaccaaagaagtcatcatcaatggccagaccgtgaaacttaaatactgtttcacctgcaagattttccggccccctcgcgcctcccattgcagcctttgtgataactgcgtagaacggtttgatcaccactgtccctgggtaggcaactgtgtggggaaaagaaactacagatttttttatatgtttattttatctctgtcttttctgacagtctttatatttgcattcgttatcacccacgtcattcttcgttcacagcaaacaggattcctaaatgcccttaaggacagtcctgcaagcgtcctggaggctgtggtgtgcttcttctctgtctggtccatcgttggcctctcaggattccacacctacttgatcagctccaaccagacaacaaatgaggacattaaaggatcctggtcaaataaaagaggtaaagaaaattacaatccctacagctacggaaatatctttaccaactgctgtgttgccctgtgtgggcccatctcaccaagcctgatcgacagaagagggtacatccagcccgacacgccgcagccagcagcaccctccaatggcatcaccatgtacggggccacgcagtcacagagtgacatgtgcgaccaagaccagtgcattcagagcaccaaattcgttttgcaggctgcagccacgcccctgctgcagagcgagcccagcctcaccagcgacgagctgcacctgcccgggaagcctggcctgggcacgccctgcgccagcctcacactgggcccgcccacaccgcccgcctccatgcccaacctcgccgaggccacgctcgcggacgtgatgccccggaaagatgagcacatgggccaccagttcctgacgcccgatgaggcgccctcgccccccaggctactggcggcgggcagccccctggcgcacagccgcaccatgcacgtgctgggcctggccagccaggactccctgcatgaggactctgtgcgcggcctggtgaagctcagctccgtgtgacccacatggccccaggccgggggacaccagaggctcctccatgggcagcaggagtgagcggaggggtgtgtcccacagcgactttcccagccaatgccacggtggagatgacagccccaggtctggggtacagagaccacttaggatggcacagggtggctggccccggatgctgagagcttggtttcatttgaattttcttccccaacctgagtgctttgacaacaatggaaatagagaagtggctgctttcttttggtgaccctccaggggtggaatcggagtgtgtctgcccgcccttgtgacagacacacggaaggcttctgacgcttgtggccagactgcaattgcacttatgtgttatgctactaatatttgaaacagacctgccattccatttgttaattaaaaaaaaaaaaaatcctaaagggaaaaaaccgaccaggtgtggatctgcatgccacgctgccgtctgtgttacagtggtgttgctatttccaaggaagtgctgctttctttttctttttttaattttgtgaattttcaagtgctgttttgttggaagacagtgcaacgaactgagactaatggacagtgtcatcactcagcttactgggctgaggcgtctgtggagaggtggcaccggggctgcagagggcggctggggttccgtcgtgtcgggtgtcacttcaccttctgtttggccgctcgatgaggtctcgtgttgagatattgtgtgccacaacccccacagtcttcacctccgtgtgtgatgaaacttcccgtggacagccaataaaatgacgtcctctgtttaattttggatctgcgtacggttatccttaatagcataaatgaaaacaaagtcatccagatggggagagtttttcttgaaatgtccctagcgaggaatggtccccagacaaccaaaagtcaaatctttgaactgggagatatttatagaataatttcttagataagaggcaagttttccatcatttattttctttaattatctctttttgacaccatcttagtggaatttgctctacgtttgcagtttgccgtgcaacagttgatcggaagtagggagaggggaggggacgctcagggagaaggttctgtcgggcgtcttctgggcttccttctgtgttaacgtgtcactcaatcccagaagtgcaacttgaggtcctagtaaaggtatcagaaaatgaggaggagaaatcggcttacagtctaagctgagatcatgtaggtcatcatccttcctagacactgatcagaatgaaattaagaaaatgaccactttgttcactttcattggtcacctagaagggaacgaactggctctggacttagggagtgtgtcactatgggggcagccacaggggacacagcaactcctctcctggcttctttccagaccataaatctaacagctaaagctactcaagttcaaagccatggccttgctccttataaccatatgaaagacaagacacattgaccaatgatacaagtaacccaagtgatttgcatttatggaaaaaggctattactcctgagaaagagttgccattttatataaaagaaaagaagataggaaaaagaaaagcacacaagttttatttggaatgaaggcaattcacaggtcacaaaataattcatgctgaaagggcctgcagagttcttgcactgtgatgtcttcgagccatctttattgtcatgctgcatgcacgtatagaaaatggaataggtccattctatgtagccatttttgattttctgaaccacctaactacttgtacccacctgcaatgtgtaattcatggggcagtgccctccttacacaaccgcacacgctcacaggcaccaactcacagggattctccttgtccacgctacctgtgagcccaaagtgacagccccacaaaggagcttccacaacttcccaaaccgtctctgctccttgctttcttccacctgctccccagaggccccaggaaggagttggccctgatgagaacggtgctccatgggtgaccgcgaatccggcttagccctcactccggtcccacgtgtggcccagtccattctcagctcattcccctggaaagcaagatcatggtcttcagaggcctcccgcttctaacatttcctaactcagtggttgccactctcctgtgaccagcccttcttcccacctcactgtgaaaaattcccagaagccaggatcacgactcacttgtcttcacataatggatatttacttaatatttattatcaatttccccacctccaaccctgtccctggcacacacttggcatcatttatccaataggggactgggaattttggtgaagtgaatcaaggctattcagggtcaagagagagattaacttgaatgggccaatttgctagataattaatgtcttaaaaaccaaaaccagagagaagcccacagccctgtcctctgtggcttgaaaaagaaacccagcatcagaggaatgagcgatgatgccccctggggcgcccacttctgtttgtcaggagggatggtcggaggggcagctcacctggcgaggtgatggctctgcatttcccacgaacatatatgtgacatgtacataaatataaatacttatgtttataaatgttgaatggttccttctagctgtggctgagtagacgttggtgtttctaacttctttcagtgtgttagagattgattacatgctagctataaaaagtaaaataaatattttaccatgctattaaagcttggaccattatcaaacacacacaaacacacactcattctgctgtttaaaaattcatctgcgttcgttctcccaggagtgctccagggaaccacaggcttcccggcacttgaaggctgaactgagcgtgagtgccctggtccccaggaagcaggcggatgctgcaggaaggtggcagacagcctgcatccaggagggccccaggaagtggggatgctgcaggaaggcggcacaaagcctgcatccgggagggccccaggaagcagggggatgctgcaggaaggtggcagacagactgcatccaggagggcacagtgacctgtcactccgttctgcagaaattggcccagcagttgcgttatgcccaaccaaaagatgctcgttccagctttcaaatgtgatgatttcagcctgtgaggacaatgccatgtccccaccctaagccagcaaaatgcgaaatctctgttctggcccagaatggcacaagggaggagtctttgcagagttccacgccaccccccagcttactgcggccttcacctgctctgtctaggattgccagctgtggttccaagtgaggagcaaacccattttatgagccatgttcctgcggagacctgatgggccaggccttctgtggctttgaaaacccctaagctcttcacctcctgggcctaggccttcttgtctgactcaacagcaagaaaaatgaacttgccaaaattggcagtaggtgtccttgacacaggggcttctgatggcatcgcccagaaaatgctggaaccagaactggtcagagactttgaagggcacagcctggcgggctactccccaagggtctcaggtctctgcccacctgactaccctgcagcaaacgcttctctgtaacctgacttctcccttcagacctcagcctacaaccatcctcttcatgccaggaaccaactgcttctcagcctcggcttagggtcttaagttcaccagaagggatcggggtttgcgttgatattataaggaatcttcccagaaggagctgcccttcatccatccacaagaatacattgagttcatttagttcttgaccaggtaagaaaagaataaaggagaacaaatattaaatactcttttctaattgatgccttactactgttttgaagctgagccgaaatcaaattgatgtttacattttctatcaagtacacatgagctgtgggagtctagcatattcttgtccaaaagagagagactttcaaatgaattcctattcctcttggtcccctccacctattttggaggtctgcatgtggagttgtatgctattttccaaggtacctcatttaaaaaaaaaaaaaaaaaaaaactgcctctcatttgttcccttaaaacgtctctctctctcataaaactaagttatcattgaaatattaaacgatctgaagcgtcttttttttttcaaataaatgtcaaagatggtaatagtttgtaaatcagtaaatcctctgtccatctgcccattgtccatggtcctgataatagagccaagatggattttcacatgtaaggtgttagtccattaatccagccattaaaagtagttgggagattgaagattagatggtttctggagcaaccgaatttgcagctgccacaaaactagataaatagccacaactggagttattttttgatctcataaaccccaggaattacacacagaatggattgaaaagcagacaagcatcttgtgctattgcagagacttttctacccaggaagtgttgaatttttaaaagaaacttgatattggtgataaaggtatgaatgaacaactctcttacttgccctcgatgtttcaagatgcctggtgaaaccgagaggccacatggcatgtccaaggagacatgctttctgggttctatatgaatagagatggttttagcctgcaattgaaaaaaaaaaaaaaaaacggttgaagccttgctaactttttcccagagcattctgggttgatatttcacagtcaaacgttttggcatggaaaaaaaaaaaaaggcattttaaactcttagtgaattcaaagctctaaatccaaacaatggtgaacacatgtacataacatttcatgttttcagagatacgtatgcttatttaagtgcctttcatgttttaatcaatgtttgcagaatttatcttaaacctgagatgaattaaaaaatttttctccttcaataaaaactgctaatggcaaaaa

SEQ ID NO: 233 - DNA, 7187 bp, Homo sapien
cctcaagacatcatgacactggctctctcccatgagatccacacctggaccttcatccaaccccaggtcccagccccatccctggctgtcacccgcgctagagggcagaacacccttctccaagacagccttctctgctcttttcccctcggaccctttgtacctttgaagggagggttgcaaagctggtttgagaaccccctttgacatcctgcagaggaggtcaggcacttttctttgaaaggtggagattcttgttgcctgttgttttttctaaacctatggagtgttcagctggaactgaggcagagagtcccatttgaggatcccgtcacaagtggtttttctggcttattgttctgccacttgaagacctgaaggcagtagtcatgaggttaactcctgtgttccacaggactgacacgtaggaggccctgctttctgagaaaagcagcccaggtagacagtcctcagaggcggggatgggcatggcctctggatacacttttgtagtttgcaaaatgcagagcacctggggaagattctgcgctgtgggtgtgcctggtcccacactgtgggggctgctccagggatactcacttattagctgaacctcctgttgctccttacacttctgcccttagactcaaggtcaatgctgagccttcactggggagaaaaaaaaggcaactttaccccaccttctaatgagcccagcaccgtagagtacagaaacagatgcctttggaagcactactcagaaacttgtctgtgggacaagggacccatttttattcattccatcaagaagaattttgcgcagcacccgctgggtgtcagcctcagagatacagatattgagacggcctgccggtccttgccctccacgctctgtgacagatgtggaagaggggctctaatccccatctctgtgtgccaggcacagggccaggtaccatggggggccacaagatgaagactctgcccttgggagcttgattgcaggcagaaagcgatgtatggggctgagaatcagagaaggggagagaggaggaagggggctaggggcaagagcaggggcttttgaacctggccttgaagaatggagagcagaggggcaggaaaagtgacttaggaagagaggggggaagagtccaaacaaaaacacagagatagccaagcagagtgcatgctggcggggctgtggctctgttcccacgtggcaggcggtcatttcccacacgctacactggcactagcaggtactcgaaacaacgtttgctgagtgaatgtagtaagaagacgtgcagttgaggctggagaggagcgctggggacagatggtgacaggtgggggtgagaccagcttagaggctcccacagttagtagacaagagggagatgctgtcatctgagcaggcgacacgcccttggcctggcgaggaggcaggccatgccgtagtcatgtttaaagggagaagggacagaatttggtcactgattatacacgaaagtgaggagaggcatagtctaagttgcctgaggtgggcctgtcacgggaagagggagccccgacgcggaacctgagatagtgctgctgcatctctggctttttattcactctcttcctgctgtgttttcttttctctcgcagcctgatcgacagaagagggtacatccagcccgacacgccgcagccagcagcaccctccaatggcatcaccatgtacggggccacgcagtcacagagtgacatgtgcgaccaagaccagtgcattcagagcaccaaattcgttttgcaggctgcagccacgcccctgctgcagagcgagcccagcctcaccagcgacgagctgcacctgcccgggaagcctggcctgggcacgccctgcgccagcctcacactgggcccgcccacaccgcccgcctccatgcccaacctcgccgaggccacgctcgcggacgtgatgccccggaaagatgagcacatgggccaccagttcctgacgcccgatgaggcgccctcgccccccaggctactggcggcgggcagccccctggcgcacagccgcaccatgcacgtgctgggcctggccagccaggactccctgcatgaggactctgtgcgcggcctggtgaagctcagctccgtgtgacccacatggccccaggccgggggacaccagaggctcctccatgggcagcaggagtgagcggaggggtgtgtcccacagcgactttcccagccaatgccacggtggagatgacagccccaggtctggggtacagagaccacttaggatggcacagggtggctggccccggatgctgagagcttggtttcatttgaattttcttccccaacctgagtgctttgacaacaatggaaatagagaagtggctgctttcttttggtgaccctccaggggtggaatcggagtgtgtctgcccgcccttgtgacagacacacggaaggcttctgacgcttgtggccagactgcaattgcacttatgtgttatgctactaatatttgaaacagacctgccattccatttgttaattaaaaaaaaaaaaaatcctaaagggaaaaaaccgaccaggtgtggatctgcatgccacgctgccgtctgtgttacagtggtgttgctatttccaaggaagtgctgctttctttttctttttttaattttgtgaattttcaagtgctgttttgttggaagacagtgcaacgaactgagactaatggacagtgtcatcactcagcttactgggctgaggcgtctgtggagaggtggcaccggggctgcagagggcggctggggttccgtcgtgtcgggtgtcacttcaccttctgtttggccgctcgatgaggtctcgtgttgagatattgtgtgccacaacccccacagtcttcacctccgtgtgtgatgaaacttcccgtggacagccaataaaatgacgtcctctgtttaattttggatctgcgtacggttatccttaatagcataaatgaaaacaaagtcatccagatggggagagtttttcttgaaatgtccctagcgaggaatggtccccagacaaccaaaagtcaaatctttgaactgggagatatttatagaataatttcttagataagaggcaagttttccatcatttattttctttaattatctctttttgacaccatcttagtggaatttgctctacgtttgcagtttgccgtgcaacagttgatcggaagtagggagaggggaggggacgctcagggagaaggttctgtcgggcgtcttctgggcttccttctgtgttaacgtgtcactcaatcccagaagtgcaacttgaggtcctagtaaaggtatcagaaaatgaggaggagaaatcggcttacagtctaagctgagatcatgtaggtcatcatccttcctagacactgatcagaatgaaattaagaaaatgaccactttgttcactttcattggtcacctagaagggaacgaactggctctggacttagggagtgtgtcactatgggggcagccacaggggacacagcaactcctctcctggcttctttccagaccataaatctaacagctaaagctactcaagttcaaagccatggccttgctccttataaccatatgaaagacaagacacattgaccaatgatacaagtaacccaagtgatttgcatttatggaaaaaggctattactcctgagaaagagttgccattttatataaaagaaaagaagataggaaaaagaaaagcacacaagttttatttggaatgaaggcaattcacaggtcacaaaataattcatgctgaaagggcctgcagagttcttgcactgtgatgtcttcgagccatctttattgtcatgctgcatgcacgtatagaaaatggaataggtccattctatgtagccatttttgattttctgaaccacctaactacttgtacccacctgcaatgtgtaattcatggggcagtgccctccttacacaaccgcacacgctcacaggcaccaactcacagggattctccttgtccacgctacctgtgagcccaaagtgacagccccacaaaggagcttccacaacttcccaaaccgtctctgctccttgctttcttccacctgctccccagaggccccaggaaggagttggccctgatgagaacggtgctccatgggtgaccgcgaatccggcttagccctcactccggtcccacgtgtggcccagtccattctcagctcattcccctggaaagcaagatcatggtcttcagaggcctcccgcttctaacatttcctaactcagtggttgccactctcctgtgaccagcccttcttcccacctcactgtgaaaaattcccagaagccaggatcacgactcacttgtcttcacataatggatatttacttaatatttattatcaatttccccacctccaaccctgtccctggcacacacttggcatcatttatccaataggggactgggaattttggtgaagtgaatcaaggctattcagggtcaagagagagattaacttgaatgggccaatttgctagataattaatgtcttaaaaaccaaaaccagagagaagcccacagccctgtcctctgtggcttgaaaaagaaacccagcatcagaggaatgagcgatgatgccccctggggcgcccacttctgtttgtcaggagggatggtcggaggggcagctcacctggcgaggtgatggctctgcatttcccacgaacatatatgtgacatgtacataaatataaatacttatgtttataaatgttgaatggttccttctagctgtggctgagtagacgttggtgtttctaacttctttcagtgtgttagagattgattacatgctagctataaaaagtaaaataaatattttaccatgctattaaagcttggaccattatcaaacacacacaaacacacactcattctgctgtttaaaaattcatctgcgttcgttctcccaggagtgctccagggaaccacaggcttcccggcacttgaaggctgaactgagcgtgagtgccctggtccccaggaagcaggcggatgctgcaggaaggtggcagacagcctgcatccaggagggccccaggaagtggggatgctgcaggaaggcggcacaaagcctgcatccgggagggccccaggaagcagggggatgctgcaggaaggtggcagacagactgcatccaggagggcacagtgacctgtcactccgttctgcagaaattggcccagcagttgcgttatgcccaaccaaaagatgctcgttccagctttcaaatgtgatgatttcagcctgtgaggacaatgccatgtccccaccctaagccagcaaaatgcgaaatctctgttctggcccagaatggcacaagggaggagtctttgcagagttccacgccaccccccagcttactgcggccttcacctgctctgtctaggattgccagctgtggttccaagtgaggagcaaacccattttatgagccatgttcctgcggagacctgatgggccaggccttctgtggctttgaaaacccctaagctcttcacctcctgggcctaggccttcttgtctgactcaacagcaagaaaaatgaacttgccaaaattggcagtaggtgtccttgacacaggggcttctgatggcatcgcccagaaaatgctggaaccagaactggtcagagactttgaagggcacagcctggcgggctactccccaagggtctcaggtctctgcccacctgactaccctgcagcaaacgcttctctgtaacctgacttctcccttcagacctcagcctacaaccatcctcttcatgccaggaaccaactgcttctcagcctcggcttagggtcttaagttcaccagaagggatcggggtttgcgttgatattataaggaatcttcccagaaggagctgcccttcatccatccacaagaatacattgagttcatttagttcttgaccaggtaagaaaagaataaaggagaacaaatattaaatactcttttctaattgatgccttactactgttttgaagctgagccgaaatcaaattgatgtttacattttctatcaagtacacatgagctgtgggagtctagcatattcttgtccaaaagagagagactttcaaatgaattcctattcctcttggtcccctccacctattttggaggtctgcatgtggagttgtatgctattttccaaggtacctcatttaaaaaaaaaaaaaaaaaaaaactgcctctcatttgttcccttaaaacgtctctctctctcataaaactaagttatcattgaaatattaaacgatctgaagcgtcttttttttttcaaataaatgtcaaagatggtaatagtttgtaaatcagtaaatcctctgtccatctgcccattgtccatggtcctgataatagagccaagatggattttcacatgtaaggtgttagtccattaatccagccattaaaagtagttgggagattgaagattagatggtttctggagcaaccgaatttgcagctgccacaaaactagataaatagccacaactggagttattttttgatctcataaaccccaggaattacacacagaatggattgaaaagcagacaagcatcttgtgctattgcagagacttttctacccaggaagtgttgaatttttaaaagaaacttgatattggtgataaaggtatgaatgaacaactctcttacttgccctcgatgtttcaagatgcctggtgaaaccgagaggccacatggcatgtccaaggagacatgctttctgggttctatatgaatagagatggttttagcctgcaattgaaaaaaaaaaaaaaaaacggttgaagccttgctaactttttcccagagcattctgggttgatatttcacagtcaaacgttttggcatggaaaaaaaaaaaaaggcattttaaactcttagtgaattcaaagctctaaatccaaacaatggtgaacacatgtacataacatttcatgttttcagagatacgtatgcttatttaagtgcctttcatgttttaatcaatgtttgcagaatttatcttaaacctgagatgaattaaaaaatttttctccttcaataaaaactgctaatggcaaaaa

SEQ ID NO: 234 - DNA, 2014 bp, Homo sapien
gcggccgcccagtcgccagcgctctctcctgggaggatccgctgccggaggaaggagtggacccaacctggccgcgccgcagaagtggctcccgaggaagccggcgccggggccgccgcctcgtgtcccctcggggcgcagtgctcgggggtcggcgggccagagccgaggcgcggccggggagccgggggctgcggggccgagcgggcagccgcgcgagggggcgggcgctcggcgacccgggggccggccgggctgagccccgcgccccgggacgcgggctggaagcgacggaggagtgctgccgcgggctgcggaccagcgccgtcccctcacggagcggggattctgctatgacagttgggctccccggagggttaacctgggtgtcctcggcaaagttgtcgccgagccgggagcccgtgtaggggccgcggcgccgcggctcggggggcggccgggcggccggcggcggtcgtggctcggcggggcccgcgcggccggggggctcctgggggtgtgcgcccccagccggctgccctcgtggatgcctcccggcggcggcgggcccatgaaagactgcgagtacagccagatcagcacccacagctcctcccccatggagtcgccccacaagaagaagaaaatcgcggcccggaggaaatgggaggtgttcccgggaagaaacaagttcttctgtaacgggaggatcatgatggcccggcagacgggcgtcttctacctgacgctcgtcctcatcctggtcactagcggactcttcttcgccttcgaagaaaggaattctgtcgttataatgactcctctgaaacgatggcttattgcatctccactgaccagtacaagagaagaggaaaagctctatgtgtctgacagtaaacattaagtggggatttagcttgctcatttccacgacatccacagttaggttaattcagtctccaaagaaaaatgattttacttgaaatgtctggtcgtatacatggatcaaaataattaagacgtttatgaagctctgcaattttctggaggggacctgcatgactgttttccagaaagttatcagatcttgctttcctgattagcagcagttagcggggtggataaaagcaccccttcagagcaatctcatttccatttctttcaggccacttattttttccaactttttttccgtatcttcataaatgtttcactcttcttttgttagtatttcttagtctcttgagtcaagaaatatttactgagtatgattgcatgcataagtagtgtgcgttagagatacgatacctgtaagacaccacagtgctgggtagatccgggtgccattgtctgttgccagggccgaagttggcattttgtaagtgttcgaataagcaccatgccgtgggataagaaataaaagtgtgtgcctcatctgtcatctgtagttgtgtatatatgccctgtcttcgggcgggcttaggtctcttctcataatttgtgcctttttgctcataacagtctggtttcaaagacacaaaacagttgttgttattgtacttagatgaagaatacagagctcctagaaggttgatgagttcatgaagaagaaggctctggaaccaggatccctcaccttggtggacttcccaccactggagcggcttccctgccggaccagggttgaccccggcaagggctctcccaggcgcacattcctttgcacattgcagctgttgggagaccgtacgtgatctcaccattctccatggcccctttccatagaccaggctggctgggtggctctgatcctgatgccccacatggcactttctgcaggtgcaggtccaaggtgggcctgcagcaaggactggtcagattactttgaaaggggacagggaggatgacatttggggcaaggagagttttactcagaaccatttgtgttgtcaccatcagggctggattaaaacctttcaaaagccatcaacactgagaagtgtatggtaacctc

SEQ ID NO: 235 - DNA, 6177 bp, Homo sapien
ctgccctgtgaagaaggtgcctgcttctctttgccttccaccatgattgtaaatttcctgaggcttttccagtcatgtggaactatatcgcaaacggcaccagttcaggggggtaccgcccgcctcccagaaccaaagaagtcatcatcaatggccagaccgtgaaacttaaatactgtttcacctgcaagattttccggccccctcgcgcctcccattgcagcctttgtgataactgcgtagaacggtttgatcaccactgtccctgggtaggcaactgtgtggggaaaagaaactacagatttttttatatgtttattttatctctgtcttttctgacagtctttatatttgcattcgttatcacccacgtcattcttcgttcacagcaaacaggattcctaaatgcccttaaggacagtcctgcaagcgtcctggaggctgtggtgtgcttcttctctgtctggtccatcgttggcctctcaggattccacacctacttgatcagctccaaccagacaacaaatgaggacattaaaggatcctggtcaaataaaagaggtaaagaaaattacaatccctacagctacggaaatatctttaccaactgctgtgttgccctgtgtgggcccatctcaccaagcctgatcgacagaagagggtacatccagcccgacacgccgcagccagcagcaccctccaatggcatcaccatgtacggggccacgcagtcacagagtgacatgtgcgaccaagaccagtgcattcagagcaccaaattcgttttgcaggctgcagccacgcccctgctgcagagcgagcccagcctcaccagcgacgagctgcacctgcccgggaagcctggcctgggcacgccctgcgccagcctcacactgggcccgcccacaccgcccgcctccatgcccaacctcgccgaggccacgctcgcggacgtgatgccccggaaagatgagcacatgggccaccagttcctgacgcccgatgaggcgccctcgccccccaggctactggcggcgggcagccccctggcgcacagccgcaccatgcacgtgctgggcctggccagccaggactccctgcatgaggactctgtgcgcggcctggtgaagctcagctccgtgtgacccacatggccccaggccgggggacaccagaggctcctccatgggcagcaggagtgagcggaggggtgtgtcccacagcgactttcccagccaatgccacggtggagatgacagccccaggtctggggtacagagaccacttaggatggcacagggtggctggccccggatgctgagagcttggtttcatttgaattttcttccccaacctgagtgctttgacaacaatggaaatagagaagtggctgctttcttttggtgaccctccaggggtggaatcggagtgtgtctgcccgcccttgtgacagacacacggaaggcttctgacgcttgtggccagactgcaattgcacttatgtgttatgctactaatatttgaaacagacctgccattccatttgttaattaaaaaaaaaaaaaatcctaaagggaaaaaaccgaccaggtgtggatctgcatgccacgctgccgtctgtgttacagtggtgttgctatttccaaggaagtgctgctttctttttctttttttaattttgtgaattttcaagtgctgttttgttggaagacagtgcaacgaactgagactaatggacagtgtcatcactcagcttactgggctgaggcgtctgtggagaggtggcaccggggctgcagagggcggctggggttccgtcgtgtcgggtgtcacttcaccttctgtttggccgctcgatgaggtctcgtgttgagatattgtgtgccacaacccccacagtcttcacctccgtgtgtgatgaaacttcccgtggacagccaataaaatgacgtcctctgtttaattttggatctgcgtacggttatccttaatagcataaatgaaaacaaagtcatccagatggggagagtttttcttgaaatgtccctagcgaggaatggtccccagacaaccaaaagtcaaatctttgaactgggagatatttatagaataatttcttagataagaggcaagttttccatcatttattttctttaattatctctttttgacaccatcttagtggaatttgctctacgtttgcagtttgccgtgcaacagttgatcggaagtagggagaggggaggggacgctcagggagaaggttctgtcgggcgtcttctgggcttccttctgtgttaacgtgtcactcaatcccagaagtgcaacttgaggtcctagtaaaggtatcagaaaatgaggaggagaaatcggcttacagtctaagctgagatcatgtaggtcatcatccttcctagacactgatcagaatgaaattaagaaaatgaccactttgttcactttcattggtcacctagaagggaacgaactggctctggacttagggagtgtgtcactatgggggcagccacaggggacacagcaactcctctcctggcttctttccagaccataaatctaacagctaaagctactcaagttcaaagccatggccttgctccttataaccatatgaaagacaagacacattgaccaatgatacaagtaacccaagtgatttgcatttatggaaaaaggctattactcctgagaaagagttgccattttatataaaagaaaagaagataggaaaaagaaaagcacacaagttttatttggaatgaaggcaattcacaggtcacaaaataattcatgctgaaagggcctgcagagttcttgcactgtgatgtcttcgagccatctttattgtcatgctgcatgcacgtatagaaaatggaataggtccattctatgtagccatttttgattttctgaaccacctaactacttgtacccacctgcaatgtgtaattcatggggcagtgccctccttacacaaccgcacacgctcacaggcaccaactcacagggattctccttgtccacgctacctgtgagcccaaagtgacagccccacaaaggagcttccacaacttcccaaaccgtctctgctccttgctttcttccacctgctccccagaggccccaggaaggagttggccctgatgagaacggtgctccatgggtgaccgcgaatccggcttagccctcactccggtcccacgtgtggcccagtccattctcagctcattcccctggaaagcaagatcatggtcttcagaggcctcccgcttctaacatttcctaactcagtggttgccactctcctgtgaccagcccttcttcccacctcactgtgaaaaattcccagaagccaggatcacgactcacttgtcttcacataatggatatttacttaatatttattatcaatttccccacctccaaccctgtccctggcacacacttggcatcatttatccaataggggactgggaattttggtgaagtgaatcaaggctattcagggtcaagagagagattaacttgaatgggccaatttgctagataattaatgtcttaaaaaccaaaaccagagagaagcccacagccctgtcctctgtggcttgaaaaagaaacccagcatcagaggaatgagcgatgatgccccctggggcgcccacttctgtttgtcaggagggatggtcggaggggcagctcacctggcgaggtgatggctctgcatttcccacgaacatatatgtgacatgtacataaatataaatacttatgtttataaatgttgaatggttccttctagctgtggctgagtagacgttggtgtttctaacttctttcagtgtgttagagattgattacatgctagctataaaaagtaaaataaatattttaccatgctattaaagcttggaccattatcaaacacacacaaacacacactcattctgctgtttaaaaattcatctgcgttcgttctcccaggagtgctccagggaaccacaggcttcccggcacttgaaggctgaactgagcgtgagtgccctggtccccaggaagcaggcggatgctgcaggaaggtggcagacagcctgcatccaggagggccccaggaagtggggatgctgcaggaaggcggcacaaagcctgcatccgggagggccccaggaagcagggggatgctgcaggaaggtggcagacagactgcatccaggagggcacagtgacctgtcactccgttctgcagaaattggcccagcagttgcgttatgcccaaccaaaagatgctcgttccagctttcaaatgtgatgatttcagcctgtgaggacaatgccatgtccccaccctaagccagcaaaatgcgaaatctctgttctggcccagaatggcacaagggaggagtctttgcagagttccacgccaccccccagcttactgcggccttcacctgctctgtctaggattgccagctgtggttccaagtgaggagcaaacccattttatgagccatgttcctgcggagacctgatgggccaggccttctgtggctttgaaaacccctaagctcttcacctcctgggcctaggccttcttgtctgactcaacagcaagaaaaatgaacttgccaaaattggcagtaggtgtccttgacacaggggcttctgatggcatcgcccagaaaatgctggaaccagaactggtcagagactttgaagggcacagcctggcgggctactccccaagggtctcaggtctctgcccacctgactaccctgcagcaaacgcttctctgtaacctgacttctcccttcagacctcagcctacaaccatcctcttcatgccaggaaccaactgcttctcagcctcggcttagggtcttaagttcaccagaagggatcggggtttgcgttgatattataaggaatcttcccagaaggagctgcccttcatccatccacaagaatacattgagttcatttagttcttgaccaggtaagaaaagaataaaggagaacaaatattaaatactcttttctaattgatgccttactactgttttgaagctgagccgaaatcaaattgatgtttacattttctatcaagtacacatgagctgtgggagtctagcatattcttgtccaaaagagagagactttcaaatgaattcctattcctcttggtcccctccacctattttggaggtctgcatgtggagttgtatgctattttccaaggtacctcatttaaaaaaaaaaaaaaaaaaaaactgcctctcatttgttcccttaaaacgtctctctctctcataaaactaagttatcattgaaatattaaacgatctgaagcgtcttttttttttcaaataaatgtcaaagatggtaatagtttgtaaatcagtaaatcctctgtccatctgcccattgtccatggtcctgataatagagccaagatggattttcacatgtaaggtgttagtccattaatccagccattaaaagtagttgggagattgaagattagatggtttctggagcaaccgaatttgcagctgccacaaaactagataaatagccacaactggagttattttttgatctcataaaccccaggaattacacacagaatggattgaaaagcagacaagcatcttgtgctattgcagagacttttctacccaggaagtgttgaatttttaaaagaaacttgatattggtgataaaggtatgaatgaacaactctcttacttgccctcgatgtttcaagatgcctggtgaaaccgagaggccacatggcatgtccaaggagacatgctttctgggttctatatgaatagagatggttttagcctgcaattgaaaaaaaaaaaaaaaaacggttgaagccttgctaactttttcccagagcattctgggttgatatttcacagtcaaacgttttggcatggaaaaaaaaaaaaaggcattttaaactcttagtgaattcaaagctctaaatccaaacaatggtgaacacatgtacataacatttcatgttttcagagatacgtatgcttatttaagtgcctttcatgttttaatcaatgtttgcagaatttatcttaaacctgagatgaattaaaaaatttttctccttcaataaaaactgctaatggcaaaaa

SEQ ID NO: 236 - DNA, 6094 bp, Homo sapien
caaagtagcgggccgaggcccgggggagcggggccgcagctgggggggcgggagcccgtggggagccgagccgagcgccccccgccccagcccccggcatgggcagtacggggccgccggggcgggcgccgagcgctgagcgctgagggtctcccatgggattgctgggatcttgctgggtgagatggcagtgtgtgcaaaaaagcgccccccagaagaagaaaggagggcgcgggctaatgaccgagaatacaatgagaaattccagtatgcgagtaactgcatcaagacctccaagtacaatattctcaccttcctgcctgtcaacctctttgagcagttccaggaagttgccaacacttacttcctgttcctcctcattctgcagttgatcccccagatctcttccctgtcctggttcaccaccattgtgcctttggttcttgtcctcaccatcacagctgttaaagatgccactgatgactatttccgccacaagagcgataaccaggtgaataaccgccagtctcaggtgctgatcaacggaatcctccagcaggagcagtggatgaatgtctgtgttggtgatattatcaagctagaaaataaccagtttgtggcggcggatctcctcctcctttccagcagtgagccccatgggctgtgttacatagagacagcagaacttgatggcgagaccaacatgaaagtacgtcaggcgattccagtcacctcagaattgggagacatcagtaagcttgccaagtttgacggtgaagtgatctgtgaacctcccaacaacaaactggacaaattcagcggaaccctctactggaaggaaaataagttccctctgagcaaccagaacatgctgctgcggggctgtgtgctgcgaaacaccgagtggtgcttcgggctggtcatctttgcaggtcccgacactaagctgatgcaaaacagcggcagaacaaagttcaaaagaacgagtatcgatcgcctaatgaataccctggtgctctggatttttggattcctggtttgcatgggggtgatcctggccattggcaatgccatctgggagcacgaggtggggatgcgtttccaggtctacctgccgtgggatgaggcagtggacagtgccttcttctctggcttcctctccttctggtcctacatcatcatcctcaacaccgttgtgcccatttcactctatgtcagtgtggaggtcatccgtctgggccacagctacttcatcaactgggataagaagatgttctgcatgaagaagcggacgcctgcagaagcccgcaccaccaccctaaacgaggagctgggccaggtggagtacatcttctccgacaagacgggcaccctcacccagaacatcatggttttcaacaagtgctccatcaatggccacagctatggtgatgtgtttgacgtcctgggacacaaagctgaattgggagagaggcctgaacctgttgacttctccttcaatcctctggctgacaagaagttcttattttgggaccccagcctgctggaggctgtcaagatcggggacccccacacgcatgagttcttccgcctcctttccctgtgtcatactgtcatgtcagaagaaaagaacgaaggagagctgtactacaaagctcagtccccagatgagggggccctggtcaccgcagccaggaactttggttttgttttccgctctcgcacccccaaaacaatcaccgtccatgagatgggcacagccatcacctaccagctgctggccatcctggacttcaacaacatccgcaagcggatgtcggtcatagtgcggaatccagaggggaagatccgactctactgcaaaggggctgacactatcctactggacagactgcaccactccactcaagagctgctcaacaccaccatggaccaccttaatgagtacgcaggggaagggctgaggaccctggtgctggcctacaaggatctggatgaagagtactatgaggagtgggctgagcgacgcctccaggccagcctggcccaggacagccgggaggacaggctggctagcatctatgaggaggttgagaacaacatgatgctgctgggtgcaacggccattgaggacaaacttcagcaaggggttccagagaccattgccctcctgacactggccaacatcaagatttgggtgctaaccggagacaagcaagagacggctgtgaacatcggctattcctgcaagatgctgacggatgacatgactgaggttttcatagtcactggccatactgtcctggaggtgcgggaggagctcaggaaagcccgggagaagatgatggactcatcccgctctgtaggcaacggcttcacctatcaggacaagctttcttcttccaagctaacttctgtcctggaggccgttgctggggagtacgccctggtcataaatggtcacagcctggcccacgcactggaggcagacatggagctggagtttctggagacagcgtgtgcctgcaaagctgtcatctgctgccgggtgacccccttgcagaaggcacaggtggtagaactggtcaagaagtacaagaaggctgtgacgcttgccattggagacggagccaatgatgtcagcatgatcaaaacggctcacattggtgtggggatcagtgggcaggaagggatccaggctgtcttggcctccgattactccttctcccagttcaagttcctgcagcgcctcctgctggtgcatgggcgctggtcctacctgcgaatgtgcaagtttctttgctatttcttctacaaaaactttgctttcaccatggtccacttctggtttggcttcttctgtggcttctcagcccagaccgtctatgaccagtatttcatcaccctgtataacatcgtgtacacctccctgccagtcctggctatgggggtctttgatcaggatgtccccgagcagcggagcatggagtaccctaagctgtatgagccgggccagctgaaccttctcttcaacaagcgggagttcttcatctgcatcgcccagggcatctacacctccgtgctcatgttcttcattccctatggggtgtttgctgatgccacccgggatgatggcactcagctggctgactaccagtcctttgcagtcactgtggccacatccttggtcattgtggttagcgtgcagattgggctcgacacaggctactggacggccatcaaccacttcttcatctggggaagccttgctgtttactttgccatcctctttgccatgcacagcaatgggctcttcgacatgtttcccaaccagttccggtttgtggggaatgcccagaacaccttggcccagcccacggtgtggctgaccattgtgctcaccacagtcgtctgcatcatgcccgtggttgccttccgattcctcaggctcaacctgaagccggatctctccgacacggtccgctacacacagctcgtgaggaagaagcagaaggcccagcaccgctgcatgcggcgggttggccgcactggctcccggcgctccggctatgccttctcccatcaggagggcttcggggagctcatcatgtctggcaagaacatgcggctgagctctctcgcgctctccagcttcaccacccgctccagctccagctggattgagagcctgcgcaggaagaagagtgacagtgccagtagccccagtggcggtgccgacaagcccctcaagggctgaaggccgaggatggatgccctgtgccagtgaccagagcacccagggctggccagtcactgagggaacagcgtctcggaactgctggtcctcattccttgcttcccgtccccccggtagactctgtcctgctggtcccaccacacatggctgggacatctgttcccagctgtaggcccttccaccagctggggagctagagggagcaggcccaagggcagagcagaggctgaggcacggggagccagccccactcggggaccagaagtggaaccaaaaacaagaaaaaactgtgagagattgtgtctgcccctgccctgcctgggacccacagggagactataatctccttatttttttactcctactccccagaggggccctagtgcctctgttcctgaattacataagaatgtaccatgccgggaagccagagacctgcaggggcctcggcccctcacatcgtgtatgtctctccttgatttgtgttgtgtccagtttggttttgtctttttttatttggcaagtggaggaggcttttatgtgacttttatgttgtggttggtgtcttaactctcctgggaaaaggaggctggcacacactgggatgccgcagcctggccggctgtggggtggtttgggaggatccatgtcggctctgcctgcagtgaccagtgctctgtggggcagaggagctgaccagggagggaggtacccatgagcagagggtagtgggagagtgtaaaggagggtttggtcctgtctgcttcctcaccttgagagtaaagtgctgccctctgcccccaacacacacacatatcaattcctggattccttagtcctgctggccttgggctggagcctaggaaagtggcccccaaatccttagtgagctaaagctgggtctgaaatttggtcagtggggaggggtagttttcttttcttttttctttttctttttttctttttttttttgagatggagtctcactcttgtcacccaggctggagtgcagtggcacaatctcagctcactgcaagctccgcctcccgggttcacgccattctcctgcctcagcctcccgagtagctgggactacaggtacccgccaccatgcccggctaaatttttgtattttttttttagtagagatggggtttcaccgtgttagccaggatggtctccatctcctgacctagtggtctgcccgcctcgacctcccaaagtgctggaattacatgcatgagccactgcgcctgaccctatttagtcttaagtaactaactgaattactagtaatttttaaaaggttggaatggtgggccaaacagtaagatgaagtttcgacgagtaggtcagttcttttccttgggtccaggaaactattgagcagcaacagaagatcagagcagagatgtggctaaacagtagcaggtatgaaaagacttagaggttctggtttctgtaagcttcaaatatctgtgatgcttgtgccaaaacagcttaagtagactgtattgtttgagagttagtatcgagaacaagggaagaactggtttcactctgcacttctgatctttacaacagggcaattgaaggaacagactaaaaatcgtgtcctggaaggaaactacaggtactaccagggattttcagtctgaagaagaaaagacaaaatagatgacagaaggagtattagaagggagagcgatgagactcagttggacaccgagagagcaaagaagcaataatacgtgaagatgaaaatgaaatcaatttcagcataagaagacaagaacttatggtaaagctgcccacagccagaagaggatcctagaaggacaggaattccctgtctgcagcatttcataagcatgtaatattgttgcagggatactgcagaaggagttgaagcagtggacagacagatgatataggtgattttacagcctaagaaagccctgtgcttgtgcccccaaaacatgaggtgctagtgaatgaatgctgggggaaagcccagggcctaggtgttgcaatgttctgtggttggcagatgctttttgttttgttaaaaagtgcaacaaataaaatttatcaatacttttctgctactcaggaaacttggactcagcataacttactttttttccagcagccttcagggtaaagtttagaaggtagatgcaacaagccaatgcagcaccctaagcttgtctttttaagttttatttttatttaacctaatatacacagagttaaataattttacttcataaaattttcacactttgagttccaagaacttaaccaaacttgaaatttggagagaagcaaaattcc

SEQ ID NO: 237 - DNA, 535 bp, Homo sapien
gccccccatgtcacccaaggcaggggcatgatgggaggtggtggggaagtcccctctttcccaggaacccatcatggcagtaagaggagagactgggagaaggaggctgggggaggggcagggtcagagctggagaagagggtcttcaaaagaggtctcatgaggggagggaagggttatcctcagcttcctgacctcattcgtctgtcacttcttgcagggtctcccatgggattgctgggatcttgctgggtgagatggcagtgtgtgcaaaaaagcgccccccaggtaagacaggcaaggaggggagatcccgggaaccatcaagagtgggtgttgttatggctcagggagcaaaaggaaaagggacaactggtatgggtctgagggagggtagcttacagcagcccctacccagcttgggggcagcctaggaaaccgaattcttccgcttgatcccaaagctgggttatctgccaggacagcgcagagcaccagccccacgccccgaaacacctgcagtcttatcttcggg

SEQ ID NO: 238 - DNA, 659 bp, Homo sapien
tgggggtgggggagacaaactgggtgcttccagtggaagaccttgaagtttggtggtgaggaaaagagaacatgtcctgtcctgtgaatgtaacctggagagccgtgtggtcaggctgctggtgagaggtggactggagggaagaatttgatgaccccctcagttgtggagctaactccttaaaatgatattctgtggaaaaaaacagggaaccccccagcaaagtgttggtccagacctcagtttgctcctcctgactgcagcatcattttgttgcagaagaagaaaggagggcgcgggctaatgaccgagaatacaatgagaaattccagtatgcggtaagcgactctagaccacctgttccctctctctgtttggagaggggaatggggcaaggacaacctaccgttgggactgagggctgcctgggaagagtgcttgggggaggggaagcaacctcctcagccactctccatctgctatcgtgctgaatttttcatgccttcacctgtcagtgaagcagaatacattgacccccttgagactcccttctctcctcctctttccccctcccacacctgtgtttgctagcttttggggtagaggtctggggaagtataaagatgggggaggcagcctcagtctggttctgggttggg

SEQ ID NO: 239 - DNA, 7003 bp, Homo sapien
gcagtagctgtgcagtgacagtgtgcctatgcagacagagggagcagtgaatagcaatagggtgtttccaccatggtcttcactcaggccccggctgaaatcatgggccacctccggatacgcagcctcctggcccggcagtgcctggcagagtttctgggtgtgtttgtactcatgctcctcacccaaggagctgtggcccaggctgtcaccagtggagaaaccaaaggcaacttcttcaccatgtttctggctggctctctggccgttacgatagccatctacgtgggtggtaacgtctcaggggcccacctgaatccagccttctccctggccatgtgcatcgttggacgcctcccctgggtcaagctccccatttacatcttggtgcagttgctgtctgctttctgtgcttcgggagccacctatgttctctaccatgatgccctacagaactatacaggtgggaacctgacagtgactggccccaaggagacagcctccatttttgccacctatcctgccccctatctgtccctgaacaatggcttcctggatcaggttctgggcaccgggatgctgattgtggggctcttggccatcctggacagacggaacaagggagtccctgcgggtctggagcctgtggtggtggggatgctgatcctggccctcgggttatccatgggtgccaactgcgggattccactcaaccctgcccgggacctgggcccacgtctcttcacctacgtggctggctggggtcctgaagtcttcagtgctggtaatggctggtggtgggtgcctgtggtggcccctctggtgggggccaccgttggcacagccacttaccagctgttggtggctctgcaccaccctgagggcccagagccagctcaggatctggtgtctgctcaacacaaagcctcagagttggaaactcctgcctcagctcagatgctggagtgtaagctatgattaggacaaccctcacttcactcatggaccctggagccagccactgaccccgcctgggaacaacagtcattcttcctctttgttaatgtgccagaacctgggaggcttctctgtttatctgtttggcatcccttcctcctaaactaagaaggatcctggacagggagaagtggaggaggataagggtctcccatgggattgctgggatcttgctgggtgagatggcagtgtgtgcaaaaaagcgccccccagaagaagaaaggagggcgcgggctaatgaccgagaatacaatgagaaattccagtatgcgagtaactgcatcaagacctccaagtacaatattctcaccttcctgcctgtcaacctctttgagcagttccaggaagttgccaacacttacttcctgttcctcctcattctgcagttgatcccccagatctcttccctgtcctggttcaccaccattgtgcctttggttcttgtcctcaccatcacagctgttaaagatgccactgatgactatttccgccacaagagcgataaccaggtgaataaccgccagtctcaggtgctgatcaatggaatcctccagcaggagcagtggatgaatgtctgtgttggtgatattatcaagctagaaaataaccagtttgtggcggcggatctcctcctcctttccagcagtgagccccatgggctgtgttacatagagacagcagaacttgatggcgagaccaacatgaaagtacgtcaggcgattccagtcacctcagaattgggagacatcagtaagcttgccaagtttgacggtgaagtgatctgtgaacctcccaacaacaaactggacaaattcagcggaaccctctactggaaggaaaataagttccctctgagcaaccagaacatgctgctgcggggctgtgtgctgcgaaacaccgagtggtgcttcgggctggtcatctttgcaggtcccgacactaagctgatgcaaaacagcggcagaacaaagttcaaaagaacgagtatcgatcgcctaatgaataccctggtgctctggatttttggattcctggtttgcatgggggtgatcctggccattggcaatgccatctgggagcacgaggtggggatgcgtttccaggtctacctgccgtgggatgaggcagtggacagtgccttcttctctggcttcctctccttctggtcctacatcatcatcctcaacaccgttgtgcccatttcactctatgtcagtgtggaggtcatccgtctgggccacagctacttcatcaactgggataagaagatgttctgcatgaagaagcggacgcctgcagaagcccgcaccaccaccctaaacgaggagctgggccaggtggagtacatcttctccgacaagacgggcaccctcacccagaacatcatggttttcaacaagtgctccatcaatggccacagctatggtgatgtgtttgacgtcctgggacacaaagctgaattgggagagaggcctgaacctgttgacttctccttcaatcctctggctgacaagaagttcttattttgggaccccagcctgctggaggctgtcaagatcggggacccccacacgcatgagttcttccgcctcctttccctgtgtcatactgtcatgtcagaagaaaagaacgaaggagagctgtactacaaagctcagtccccagatgagggggccctggtcaccgcagccaggaactttggttttgttttccgctctcgcacccccaaaacaatcaccgtccatgagatgggcacagccatcacctaccagctgctggccatcctggacttcaacaacatccgcaagcggatgtcggtcatagtgcggaatccagaggggaagatccgactctactgcaaaggggctgacactatcctactggacagactgcaccactccactcaagagctgctcaacaccaccatggaccaccttaatgagtacgcaggggaagggctgaggaccctggtgctggcctacaaggatctggatgaagagtactacgaggagtgggctgagcgacgcctccaggccagcctggcccaggacagccgggaggacaggctggctagcatctatgaggaggttgagaacaacatgatgctgctgggtgcaacggccattgaggacaaacttcagcaaggggttccagagaccattgccctcctgacactggccaacatcaagatttgggtgctaaccggagacaagcaagagacggctgtgaacatcggctattcctgcaagatgctgacggatgacatgactgaggttttcatagtcactggccatactgtcctggaggtgcgggaggagctcaggaaagcccgggagaagatgatggactcatcccgctccgtaggcaacggcttcacctatcaggacaagctttcttcttccaagctaacttctgtcctggaggccgttgctggggagtacgccctggtcataaatggtcacagcctggcccacgcactggaggcagacatggagctggagtttctggagacagcgtgtgcctgcaaagctgtcatctgctgccgggtgacccccttgcagaaggcacaggtggtagaactggtcaagaagtacaagaaggctgtgacgcttgccattggagacggagccaatgatgtcagcatgatcaaaacggctcacattggtgtggggatcagtgggcaggaagggatccaggctgtcttggcctccgattactccttctcccagttcaagttcctgcagcgcctcctgctggtgcatgggcgctggtcctacctgcgaatgtgcaagtttctttgctatttcttctacaaaaactttgctttcaccatggtccacttctggtttggcttcttctgtggcttctcagcccagaccgtctatgaccagtatttcatcaccctgtataacatcgtgtacacctccctgccagtcctggctatgggggtctttgatcaggatgtccccgagcagcggagcatggagtaccctaagctgtatgagccgggccagctgaaccttctcttcaacaagcgggagttcttcatctgcatcgcccagggcatctacacctccgtgctcatgttcttcattccctatggggtgtttgctgatgccacccgggatgatggcactcagctggctgactaccagtcctttgcagtcactgtggccacatccttggtcattgtggttagcgtgcagattgggctcgacacaggctactggacggccatcaaccacttcttcatctggggaagccttgctgtttactttgccatcctctttgccatgcacagcaatgggctcttcgacatgtttcccaaccagttccggtttgtggggaatgcccagaacaccttggcccagcccacggtgtggctgaccattgtgctcaccacagtcgtctgcatcatgcccgtggttgccttccgattcctcaggctcaacctgaagccggatctctccgacacggtccgctacacacagctcgtgaggaagaagcagaaggcccagcaccgctgcatgcggcgggttggccgcactggctcccggcgctccggctatgccttctcccatcaggagggcttcggggagctcatcatgtctggcaagaacatgcggctgagctctctcgcgctctccagcttcaccacccgctccagctccagctggattgagagcctgcgcaggaagaagagtgacagtgccagtagccccagtggcggtgccgacaagcccctcaagggctgaaggccgaggatggatgccctgtgccagtgaccagagcacccagggctggccagtcactgagggaacagcgtctcggaactgctggtcctcattccttgcttcccgtccccccggtagactctgtcctgctggtcccaccacacatggctgggacatctgttcccagctgtaggcccttccaccagctggggagctagagggagcaggcccaagggcagagcagaggctgaggcacggggagccagccccactcggggaccagaagtggaaccaaaaacaagaaaaaactgtgagagattgtgtctgcccctgccctgcctgggacccacagggagactataatctccttatttttttactcctactccccagaggggccctagtgcctctgttcctgaattacataagaatgtaccatgccgggaagccagagacctgcaggggcctcggcccctcacatcgtgtatgtctctccttgatttgtgttgtgtccagtttggttttgtctttttttatttggcaagtggaggaggcttttatgtgacttttatgttgtggttggtgtcttaactctcctgggaaaaggaggctggcacacactgggatgccgcagcctggccggctgtggggtggtttgggaggatccatgtcggctctgcctgcagtgaccagtgctctgtggggcagaggagctgaccagggagggaggtacccatgagcagagggtagtgggagagtgtaaaggagggtttggtcctgtctgcttcctcaccttgagagtaaagtgctgccctctgcccccaacacacacacatatcaattcctggattccttagtcctgctggccttgggctggagcctaggaaagtggcccccaaatccttagtgagctaaagctgggtctgaaatttggtcagtggggaggggtagttttcttttcttttttctttttctttttttctttttttttttgagatggagtctcactcttgtcacctaggcaagagtgcaatggcacaatctcagctcactgcaacctccacctcctgggttcaagcgattctcctgcctcagcctcctgagtagctgggattacaggcacacaccaccacgcttggttaatttttgtatttttagtagagatgtttcaccatgttggccaggctagtcttgaattcctgacctcctgacctgcccacctcaacctcccaaagtgctgagattacaggcgtgagccaccacacccagctcagggaggcgtagttttctttaattttaaatttaaacccaagtttattggcagactcccttttgacctccctttgcctccccatctggtgctttcttgcatctacaccccagggccctgtggtggggctgcagggggaagctgtgcacctgagatgaggctggaacgggaattggcctctctgctcccttcttcagtaagcaaggagccccgcccctcaggcccagcctctggcaagaggtggtggaatccttgtgccgggtagtagaggaggataagggcaaaaccaggcccaggccagtgcctggcttggtctggatgggacactgtcagagtttggccacagcctgtcctttacttcatccacacctatgaagctattccctaaataaggcatttcccaagttagtcgctacctaatcagccttgagaagaatcctttcctcttctttgatagtgggtcgggggattcttcaggaatggtttggagctgggagtgggtagggggattttaaatgttccatatgggagccccaaaggaactggatgggctgcagtgaggtgggggcgggtgggcagggaatgggagaggggaagtcttggcagggaaatcccttttggccacacagtttacaaacccagtatcatgtctgtctgtgtgtctctcaaggtgagagtctgatttttataccaaagaggaaatgattttttttcatattttgtttgtctatattatataaatatatatatacagtatatatatatatatattattttttggttctctctcgttttttagggagggaagaaagtaccaagttgcattgagctgtaattaaggaacattataatttatgacacatttctatacttgcaaaaattatatcattttatggatataagagaaaaatgcctttttataaaatttcaatttctgaaaaaaagtaatttgtctcttttctgatgtttaaccaagactggt

SEQ ID NO: 240 - DNA, 5427 bp, Homo sapien
caaccaccacaatgcgctgtgccattgtgaagtggtggtgttctgcagatgcccagggccctctccctctggagtcagcacctcagccctgcccggtgttcagaatcaggaatgtagtgccccaagcccagggtggaaggagcgcacccagcctgtggtgggacagtgacgagtgggcttcaagccttctccatttcccctccccggtgccacccctctttgaggtggcgtctgtgttgctgtggcatgcacagcaccctcattatttctctctctcttttctctcccctccctctggcactttctcttgtttttctctgcatggtttctgtattattagtcctgaggtaagaactggccgagtgccttgtctacagccccttttcctcctttgctgtctgtcctgcccacccaggccctttgcaccttcttgtctggagagcatcaggagggtcgggtcggggcgttcctctgctggctgtgtgcagccggctccaccttcaggctctccttgccctttcccacccaggtttctgtgcccaggtgtcttctccgttcttgtctctccccaggcggagggcctgcagcgaaggcccatgtgggtggggcacctcctcttcttcccgacccaagcctcacctcttgtcccctgtgcagtgtggaggtcatccgtctgggccacagctacttcatcaactgggataagaagatgttctgcatgaagaagcggacgcctgcagaagcccgcaccaccaccctaaacgaggagctgggccaggtggagtacatcttctccgacaagacgggcaccctcacccagaacatcatggttttcaacaagtgctccatcaatggccacagctatggtgatgtgtttgacgtcctgggacacaaagctgaattgggagagaggcctgaacctgttgacttctccttcaatcctctggctgacaagaagttcttattttgggaccccagcctgctggaggctgtcaagatcggggacccccacacgcatgagttcttccgcctcctttccctgtgtcatactgtcatgtcagaagaaaagaacgaaggagagctgtactacaaagctcagtccccagatgagggggccctggtcaccgcagccaggaactttggttttgttttccgctctcgcacccccaaaacaatcaccgtccatgagatgggcacagccatcacctaccagctgctggccatcctggacttcaacaacatccgcaagcggatgtcggtcatagtgcggaatccagaggggaagatccgactctactgcaaaggggctgacactatcctactggacagactgcaccactccactcaagagctgctcaacaccaccatggaccaccttaatgagtacgcaggggaagggctgaggaccctggtgctggcctacaaggatctggatgaagagtactacgaggagtgggctgagcgacgcctccaggccagcctggcccaggacagccgggaggacaggctggctagcatctatgaggaggttgagaacaacatgatgctgctgggtgcaacggccattgaggacaaacttcagcaaggggttccagagaccattgccctcctgacactggccaacatcaagatttgggtgctaaccggagacaagcaagagacggctgtgaacatcggctattcctgcaagatgctgacggatgacatgactgaggttttcatagtcactggccatactgtcctggaggtgcgggaggagctcaggaaagcccgggagaagatgatggactcatcccgctccgtaggcaacggcttcacctatcaggacaagctttcttcttccaagctaacttctgtcctggaggccgttgctggggagtacgccctggtcataaatggtcacagcctggcccacgcactggaggcagacatggagctggagtttctggagacagcgtgtgcctgcaaagctgtcatctgctgccgggtgacccccttgcagaaggcacaggtggtagaactggtcaagaagtacaagaaggctgtgacgcttgccattggagacggagccaatgatgtcagcatgatcaaaacggctcacattggtgtggggatcagtgggcaggaagggatccaggctgtcttggcctccgattactccttctcccagttcaagttcctgcagcgcctcctgctggtgcatgggcgctggtcctacctgcgaatgtgcaagtttctttgctatttcttctacaaaaactttgctttcaccatggtccacttctggtttggcttcttctgtggcttctcagcccagaccgtctatgaccagtatttcatcaccctgtataacatcgtgtacacctccctgccagtcctggctatgggggtctttgatcaggatgtccccgagcagcggagcatggagtaccctaagctgtatgagccgggccagctgaaccttctcttcaacaagcgggagttcttcatctgcatcgcccagggcatctacacctccgtgctcatgttcttcattccctatggggtgtttgctgatgccacccgggatgatggcactcagctggctgactaccagtcctttgcagtcactgtggccacatccttggtcattgtggttagcgtgcagattgggctcgacacaggctactggacggccatcaaccacttcttcatctggggaagccttgctgtttactttgccatcctctttgccatgcacagcaatgggctcttcgacatgtttcccaaccagttccggtttgtggggaatgcccagaacaccttggcccagcccacggtgtggctgaccattgtgctcaccacagtcgtctgcatcatgcccgtggttgccttccgattcctcaggctcaacctgaagccggatctctccgacacggtccgctacacacagctcgtgaggaagaagcagaaggcccagcaccgctgcatgcggcgggttggccgcactggctcccggcgctccggctatgccttctcccatcaggagggcttcggggagctcatcatgtctggcaagaacatgcggctgagctctctcgcgctctccagcttcaccacccgctccagctccagctggattgagagcctgcgcaggaagaagagtgacagtgccagtagccccagtggcggtgccgacaagcccctcaagggctgaaggccgaggatggatgccctgtgccagtgaccagagcacccagggctggccagtcactgagggaacagcgtctcggaactgctggtcctcattccttgcttcccgtccccccggtagactctgtcctgctggtcccaccacacatggctgggacatctgttcccagctgtaggcccttccaccagctggggagctagagggagcaggcccaagggcagagcagaggctgaggcacggggagccagccccactcggggaccagaagtggaaccaaaaacaagaaaaaactgtgagagattgtgtctgcccctgccctgcctgggacccacagggagactataatctccttatttttttactcctactccccagaggggccctagtgcctctgttcctgaattacataagaatgtaccatgccgggaagccagagacctgcaggggcctcggcccctcacatcgtgtatgtctctccttgatttgtgttgtgtccagtttggttttgtctttttttatttggcaagtggaggaggcttttatgtgacttttatgttgtggttggtgtcttaactctcctgggaaaaggaggctggcacacactgggatgccgcagcctggccggctgtggggtggtttgggaggatccatgtcggctctgcctgcagtgaccagtgctctgtggggcagaggagctgaccagggagggaggtacccatgagcagagggtagtgggagagtgtaaaggagggtttggtcctgtctgcttcctcaccttgagagtaaagtgctgccctctgcccccaacacacacacatatcaattcctggattccttagtcctgctggccttgggctggagcctaggaaagtggcccccaaatccttagtgagctaaagctgggtctgaaatttggtcagtggggaggggtagttttcttttcttttttctttttctttttttctttttttttttgagatggagtctcactcttgtcacctaggcaagagtgcaatggcacaatctcagctcactgcaacctccacctcctgggttcaagcgattctcctgcctcagcctcctgagtagctgggattacaggcacacaccaccacgcttggttaatttttgtatttttagtagagatgtttcaccatgttggccaggctagtcttgaattcctgacctcctgacctgcccacctcaacctcccaaagtgctgagattacaggcgtgagccaccacacccagctcagggaggcgtagttttctttaattttaaatttaaacccaagtttattggcagactcccttttgacctccctttgcctccccatctggtgctttcttgcatctacaccccagggccctgtggtggggctgcagggggaagctgtgcacctgagatgaggctggaacgggaattggcctctctgctcccttcttcagtaagcaaggagccccgcccctcaggcccagcctctggcaagaggtggtggaatccttgtgccgggtagtagaggaggataagggcaaaaccaggcccaggccagtgcctggcttggtctggatgggacactgtcagagtttggccacagcctgtcctttacttcatccacacctatgaagctattccctaaataaggcatttcccaagttagtcgctacctaatcagccttgagaagaatcctttcctcttctttgatagtgggtcgggggattcttcaggaatggtttggagctgggagtgggtagggggattttaaatgttccatatgggagccccaaaggaactggatgggctgcagtgaggtgggggcgggtgggcagggaatgggagaggggaagtcttggcagggaaatcccttttggccacacagtttacaaacccagtatcatgtctgtctgtgtgtctctcaaggtgagagtctgatttttataccaaagaggaaatgattttttttcatattttgtttgtctatattatataaatatatatatacagtatatatatatatatattattttttggttctctctcgttttttagggagggaagaaagtaccaagttgcattgagctgtaattaaggaacattataatttatgacacatttctatacttgcaaaaattatatcattttatggatataagagaaaaatgcctttttataaaatttcaatttctgaaaaaaagtaatttgtctcttttctgatgtttaaccaagactggt

SEQ ID NO: 241 - DNA, 7463 bp, Homo sapien
gcagtagctgtgcagtgacagtgtgcctatgcagacagagggagcagtgaatagcaatagggtgtttccaccatggtcttcactcaggccccggctgaaatcatgggccacctccggatacgcagcctcctggcccggcagtgcctggcagagtttctgggtgtgtttgtactcatgctcctcacccaaggagctgtggcccaggctgtcaccagtggagaaaccaaaggcaacttcttcaccatgtttctggctggctctctggccgttacgatagccatctacgtgggtggtaacgtctcaggggcccacctgaatccagccttctccctggccatgtgcatcgttggacgcctcccctgggtcaagctccccatttacatcttggtgcagttgctgtctgctttctgtgcttcgggagccacctatgttctctaccatgatgccctacagaactatacaggtgggaacctgacagtgactggccccaaggagacagcctccatttttgccacctatcctgccccctatctgtccctgaacaatggcttcctggatcaggttctgggcaccgggatgctgattgtggggctcttggccatcctggacagacggaacaagggagtccctgcgggtctggagcctgtggtggtggggatgctgatcctggccctcgggttatccatgggtgccaactgcgggattccactcaaccctgcccgggacctgggcccacgtctcttcacctacgtggctggctggggtcctgaagtcttcagtgctggtaatggctggtggtgggtgcctgtggtggcccctctggtgggggccaccgttggcacagccacttaccagctgttggtggctctgcaccaccctgagggcccagagccagctcaggatctggtgtctgctcaacacaaagcctcagagttggaaactcctgcctcagctcagatgctggagtgtaagctatgattaggacaaccctcacttcactcatggaccctggagccagccactgaccccgcctgggaacaacagtcattcttcctctttgttaatgtgccagaacctgggaggcttctctgtttatctgtttggcatcccttcctcctaaactaagaaggatcctggacagggagaagtggaggaggataagggtctcccatgggattgctgggatcttgctgggtgagatggcagtgtgtgcaaaaaagcgccccccagaagaagaaaggagggcgcgggctaatgaccgagaatacaatgagaaattccagtatgcgagtaactgcatcaagacctccaagtacaatattctcaccttcctgcctgtcaacctctttgagcagttccaggaagttgccaacacttacttcctgttcctcctcattctgcagttgatcccccagatctcttccctgtcctggttcaccaccattgtgcctttggttcttgtcctcaccatcacagctgttaaagatgccactgatgactatttccgccacaagagcgataaccaggtgaataaccgccagtctcaggtgctgatcaatggaatcctccagcaggagcagtggatgaatgtctgtgttggtgatattatcaagctagaaaataaccagtttgtggcggtaagggacagggtacccctctaggcctgtaggttcttcctcttctttgtgagaaaaggatgaatctttcctgatttactgttgcctcttaaacacccgtggcaggaatctttctcacaccaggggcttctgtgtcatgctgatatgcctggaactagccatttatgcacctggaactaagcaaaccaagaatgcttagtggaaggagccaccattacagcccactgggggtggaggtttgcatatttggacttctcattagtttttctctctaggcggatctcctcctcctttccagcagtgagccccatgggctgtgttacatagagacagcagaacttgatggcgagaccaacatgaaagtacgtcaggcgattccagtcacctcagaattgggagacatcagtaagcttgccaagtttgacggtgaagtgatctgtgaacctcccaacaacaaactggacaaattcagcggaaccctctactggaaggaaaataagttccctctgagcaaccagaacatgctgctgcggggctgtgtgctgcgaaacaccgagtggtgcttcgggctggtcatctttgcaggtcccgacactaagctgatgcaaaacagcggcagaacaaagttcaaaagaacgagtatcgatcgcctaatgaataccctggtgctctggatttttggattcctggtttgcatgggggtgatcctggccattggcaatgccatctgggagcacgaggtggggatgcgtttccaggtctacctgccgtgggatgaggcagtggacagtgccttcttctctggcttcctctccttctggtcctacatcatcatcctcaacaccgttgtgcccatttcactctatgtcagtgtggaggtcatccgtctgggccacagctacttcatcaactgggataagaagatgttctgcatgaagaagcggacgcctgcagaagcccgcaccaccaccctaaacgaggagctgggccaggtggagtacatcttctccgacaagacgggcaccctcacccagaacatcatggttttcaacaagtgctccatcaatggccacagctatggtgatgtgtttgacgtcctgggacacaaagctgaattgggagagaggcctgaacctgttgacttctccttcaatcctctggctgacaagaagttcttattttgggaccccagcctgctggaggctgtcaagatcggggacccccacacgcatgagttcttccgcctcctttccctgtgtcatactgtcatgtcagaagaaaagaacgaaggagagctgtactacaaagctcagtccccagatgagggggccctggtcaccgcagccaggaactttggttttgttttccgctctcgcacccccaaaacaatcaccgtccatgagatgggcacagccatcacctaccagctgctggccatcctggacttcaacaacatccgcaagcggatgtcggtcatagtgcggaatccagaggggaagatccgactctactgcaaaggggctgacactatcctactggacagactgcaccactccactcaagagctgctcaacaccaccatggaccaccttaatgagtacgcaggggaagggctgaggaccctggtgctggcctacaaggatctggatgaagagtactacgaggagtgggctgagcgacgcctccaggccagcctggcccaggacagccgggaggacaggctggctagcatctatgaggaggttgagaacaacatgatgctgctgggtgcaacggccattgaggacaaacttcagcaaggggttccagagaccattgccctcctgacactggccaacatcaagatttgggtgctaaccggagacaagcaagagacggctgtgaacatcggctattcctgcaagatgctgacggatgacatgactgaggttttcatagtcactggccatactgtcctggaggtgcgggaggagctcaggaaagcccgggagaagatgatggactcatcccgctccgtaggcaacggcttcacctatcaggacaagctttcttcttccaagctaacttctgtcctggaggccgttgctggggagtacgccctggtcataaatggtcacagcctggtaggcatcgctatccttagcttgggcagtatctttccagtgagcacttctgtccagggcttttatatcttgttctaatttcccctgatttcagagaagactggtctcaaaggggactgggaggagctgagactcccaggtgtctcctggaaagaccggctctctcaggtttctctgtgctccaggcccacgcactggaggcagacatggagctggagtttctggagacagcgtgtgcctgcaaagctgtcatctgctgccgggtgacccccttgcagaaggcacaggtggtagaactggtcaagaagtacaagaaggctgtgacgcttgccattggagacggagccaatgatgtcagcatgatcaaaacggctcacattggtgtggggatcagtgggcaggaagggatccaggctgtcttggcctccgattactccttctcccagttcaagttcctgcagcgcctcctgctggtgcatgggcgctggtcctacctgcgaatgtgcaagtttctttgctatttcttctacaaaaactttgctttcaccatggtccacttctggtttggcttcttctgtggcttctcagcccagaccgtctatgaccagtatttcatcaccctgtataacatcgtgtacacctccctgccagtcctggctatgggggtctttgatcaggatgtccccgagcagcggagcatggagtaccctaagctgtatgagccgggccagctgaaccttctcttcaacaagcgggagttcttcatctgcatcgcccagggcatctacacctccgtgctcatgttcttcattccctatggggtgtttgctgatgccacccgggatgatggcactcagctggctgactaccagtcctttgcagtcactgtggccacatccttggtcattgtggttagcgtgcagattgggctcgacacaggctactggacggccatcaaccacttcttcatctggggaagccttgctgtttactttgccatcctctttgccatgcacagcaatgggctcttcgacatgtttcccaaccagttccggtttgtggggaatgcccagaacaccttggcccagcccacggtgtggctgaccattgtgctcaccacagtcgtctgcatcatgcccgtggttgccttccgattcctcaggctcaacctgaagccggatctctccgacacggtccgctacacacagctcgtgaggaagaagcagaaggcccagcaccgctgcatgcggcgggttggccgcactggctcccggcgctccggctatgccttctcccatcaggagggcttcggggagctcatcatgtctggcaagaacatgcggctgagctctctcgcgctctccagcttcaccacccgctccagctccagctggattgagagcctgcgcaggaagaagagtgacagtgccagtagccccagtggcggtgccgacaagcccctcaagggctgaaggccgaggatggatgccctgtgccagtgaccagagcacccagggctggccagtcactgagggaacagcgtctcggaactgctggtcctcattccttgcttcccgtccccccggtagactctgtcctgctggtcccaccacacatggctgggacatctgttcccagctgtaggcccttccaccagctggggagctagagggagcaggcccaagggcagagcagaggctgaggcacggggagccagccccactcggggaccagaagtggaaccaaaaacaagaaaaaactgtgagagattgtgtctgcccctgccctgcctgggacccacagggagactataatctccttatttttttactcctactccccagaggggccctagtgcctctgttcctgaattacataagaatgtaccatgccgggaagccagagacctgcaggggcctcggcccctcacatcgtgtatgtctctccttgatttgtgttgtgtccagtttggttttgtctttttttatttggcaagtggaggaggcttttatgtgacttttatgttgtggttggtgtcttaactctcctgggaaaaggaggctggcacacactgggatgccgcagcctggccggctgtggggtggtttgggaggatccatgtcggctctgcctgcagtgaccagtgctctgtggggcagaggagctgaccagggagggaggtacccatgagcagagggtagtgggagagtgtaaaggagggtttggtcctgtctgcttcctcaccttgagagtaaagtgctgccctctgcccccaacacacacacatatcaattcctggattccttagtcctgctggccttgggctggagcctaggaaagtggcccccaaatccttagtgagctaaagctgggtctgaaatttggtcagtggggaggggtagttttcttttcttttttctttttctttttttctttttttttttgagatggagtctcactcttgtcacctaggcaagagtgcaatggcacaatctcagctcactgcaacctccacctcctgggttcaagcgattctcctgcctcagcctcctgagtagctgggattacaggcacacaccaccacgcttggttaatttttgtatttttagtagagatgtttcaccatgttggccaggctagtcttgaattcctgacctcctgacctgcccacctcaacctcccaaagtgctgagattacaggcgtgagccaccacacccagctcagggaggcgtagttttctttaattttaaatttaaacccaagtttattggcagactcccttttgacctccctttgcctccccatctggtgctttcttgcatctacaccccagggccctgtggtggggctgcagggggaagctgtgcacctgagatgaggctggaacgggaattggcctctctgctcccttcttcagtaagcaaggagccccgcccctcaggcccagcctctggcaagaggtggtggaatccttgtgccgggtagtagaggaggataagggcaaaaccaggcccaggccagtgcctggcttggtctggatgggacactgtcagagtttggccacagcctgtcctttacttcatccacacctatgaagctattccctaaataaggcatttcccaagttagtcgctacctaatcagccttgagaagaatcctttcctcttctttgatagtgggtcgggggattcttcaggaatggtttggagctgggagtgggtagggggattttaaatgttccatatgggagccccaaaggaactggatgggctgcagtgaggtgggggcgggtgggcagggaatgggagaggggaagtcttggcagggaaatcccttttggccacacagtttacaaacccagtatcatgtctgtctgtgtgtctctcaaggtgagagtctgatttttataccaaagaggaaatgattttttttcatattttgtttgtctatattatataaatatatatatacagtatatatatatatatattattttttggttctctctcgttttttagggagggaagaaagtaccaagttgcattgagctgtaattaaggaacattataatttatgacacatttctatacttgcaaaaattatatcattttatggatataagagaaaaatgcctttttataaaatttcaatttctgaaaaaaagtaatttgtctcttttctgatgtttaaccaagactggt

SEQ ID NO: 242 - DNA, 7699 bp, Homo sapien
gcagtagctgtgcagtgacagtgtgcctatgcagacagagggagcagtgaatagcaatagggtgtttccaccatggtcttcactcaggccccggctgaaatcatgggccacctccggatacgcagcctcctggcccggcagtgcctggcagagtttctgggtgtgtttgtactcatgctcctcacccaaggagctgtggcccaggctgtcaccagtggagaaaccaaaggcaacttcttcaccatgtttctggctggctctctggccgttacgatagccatctacgtgggtggtaacgtctcaggggcccacctgaatccagccttctccctggccatgtgcatcgttggacgcctcccctgggtcaagctccccatttacatcttggtgcagttgctgtctgctttctgtgcttcgggagccacctatgttctctaccatgatgccctacagaactatacaggtgggaacctgacagtgactggccccaaggagacagcctccatttttgccacctatcctgccccctatctgtccctgaacaatggcttcctggatcaggttctgggcaccgggatgctgattgtggggctcttggccatcctggacagacggaacaagggagtccctgcgggtctggagcctgtggtggtggggatgctgatcctggccctcgggttatccatgggtgccaactgcgggattccactcaaccctgcccgggacctgggcccacgtctcttcacctacgtggctggctggggtcctgaagtcttcagtgctggtaatggctggtggtgggtgcctgtggtggcccctctggtgggggccaccgttggcacagccacttaccagctgttggtggctctgcaccaccctgagggcccagagccagctcaggatctggtgtctgctcaacacaaagcctcagagttggaaactcctgcctcagctcagatgctggagtgtaagctatgattaggacaaccctcacttcactcatggaccctggagccagccactgaccccgcctgggaacaacagtcattcttcctctttgttaatgtgccagaacctgggaggcttctctgtttatctgtttggcatcccttcctcctaaactaagaaggatcctggacagggagaagtggaggaggataagggtctcccatgggattgctgggatcttgctgggtgagatggcagtgtgtgcaaaaaagcgccccccagaagaagaaaggagggcgcgggctaatgaccgagaatacaatgagaaattccagtatgcgagtaactgcatcaagacctccaagtacaatattctcaccttcctgcctgtcaacctctttgagcagttccaggaagttgccaacacttacttcctgttcctcctcattctgcagttgatcccccagatctcttccctgtcctggttcaccaccattgtgcctttggttcttgtcctcaccatcacagctgttaaagatgccactgatgactatttccgccacaagagcgataaccaggtgaataaccgccagtctcaggtgctgatcaatggaatcctccagcaggagcagtggatgaatgtctgtgttggtgatattatcaagctagaaaataaccagtttgtggcggtaagggacagggtacccctctaggcctgtaggttcttcctcttctttgtgagaaaaggatgaatctttcctgatttactgttgcctcttaaacacccgtggcaggaatctttctcacaccaggggcttctgtgtcatgctgatatgcctggaactagccatttatgcacctggaactaagcaaaccaagaatgcttagtggaaggagccaccattacagcccactgggggtggaggtttgcatatttggacttctcattagtttttctctctaggcggatctcctcctcctttccagcagtgagccccatgggctgtgttacatagagacagcagaacttgatggcgagaccaacatgaaagtacgtcaggcgattccagtcacctcagaattgggagacatcagtaagcttgccaagtttgacggtgaagtgatctgtgaacctcccaacaacaaactggacaaattcagcggaaccctctactggaaggaaaataagttccctctgagcaaccagaacatgctgctgcggggctgtgtgctgcgaaacaccgagtggtgcttcgggctggtcatctttgcaggtcccgacactaagctgatgcaaaacagcggcagaacaaagttcaaaagaacgagtatcgatcgcctaatgaataccctggtgctctggatttttggattcctggtttgcatgggggtgatcctggccattggcaatgccatctgggagcacgaggtggggatgcgtttccaggtctacctgccgtgggatgaggcagtggacagtgccttcttctctggcttcctctccttctggtcctacatcatcatcctcaacaccgttgtgcccatttcactctatgtcagtgtggaggtcatccgtctgggccacagctacttcatcaactgggataagaagatgttctgcatgaagaagcggacgcctgcagaagcccgcaccaccaccctaaacgaggagctgggccaggtggagtacatcttctccgacaagacgggcaccctcacccagaacatcatggttttcaacaagtgctccatcaatggccacagctatggtgatgtgtttgacgtcctgggacacaaagctgaattgggagagaggcctgaacctgttgacttctccttcaatcctctggctgacaagaagttcttattttgggaccccagcctgctggaggctgtcaagatcggggacccccacacgcatgagttcttccgcctcctttccctgtgtcatactgtcatgtcagaagaaaagaacgaaggagagctgtactacaaagctcagtccccagatgagggggccctggtcaccgcagccaggaactttggttttgttttccgctctcgcacccccaaaacaatcaccgtccatgagatgggcacagccatcacctaccagctgctggccatcctggacttcaacaacatccgcaagcggatgtcggtcatagtgcggaatccagaggggaagatccgactctactgcaaaggggctgacactatcctactggacagactgcaccactccactcaagagctgctcaacaccaccatggaccaccttaatgagtacgcaggggaagggctgaggaccctggtgctggcctacaaggatctggatgaagagtactacgaggagtgggctgagcgacgcctccaggccagcctggcccaggacagccgggaggacaggctggctagcatctatgaggaggttgagaacaacatgatgctgctgggtgcaacggccattgaggacaaacttcagcaaggggttccagagaccattgccctcctgacactggccaacatcaagatttgggtgctaaccggagacaagcaagagacggctgtgaacatcggctattcctgcaagatgctgacggatgacatgactgaggttttcatagtcactggccatactgtcctggaggtgcgggaggagctcaggaaagcccgggagaagatgatggactcatcccgctccgtaggcaacggcttcacctatcaggacaagctttcttcttccaagctaacttctgtcctggaggccgttgctggggagtacgccctggtcataaatggtcacagcctggcccacgcactggaggcagacatggagctggagtttctggagacagcgtgtgcctgcaaagctgtcatctgctgccgggtgacccccttgcagaaggcacaggtggtagaactggtcaagaagtacaagaaggctgtgacgcttgccattggagacggagccaatgatgtcagcatgatcaaaagtgagtgtgggctgtgcaggtgtgtaggctgggcttgaggctggggaggggcccactgaggtctctggactgcagaagaatgacgggaagggggttgtaacttggtaggctctaaagtgtgtggccggtggccatcttcaccctcttgtcatctcttgtctctgcagcggctcacattggtgtggggatcagtgggcaggaagggatccaggctgtcttggcctccgattactccttctcccagttcaagttcctgcagcgcctcctgctggtgcatgggcgctggtcctacctgcgaatgtgcaagtttctttgctatttcttctacaaaaactttgctttcaccatggtccacttctggtttggcttcttctgtggcttctcagcccaggtaataaatgttcccagtccactgttgtgcaaatctgtaaacctgagggcagaggttctgtcttgtttatcactcagtcccccagggcctagctattttctggtacatactcttaaaaaatgcttattaaaggaggagagaaggagcctcagaaaatttcttagggttctctgtatgtgacatcagctgtcttcctgtgcctgatgtgtagcaaagaaaggttgcatgctcccttgctccctgttctcttccagaccgtctatgaccagtatttcatcaccctgtataacatcgtgtacacctccctgccagtcctggctatgggggtctttgatcaggatgtccccgagcagcggagcatggagtaccctaagctgtatgagccgggccagctgaaccttctcttcaacaagcgggagttcttcatctgcatcgcccagggcatctacacctccgtgctcatgttcttcattccctatggggtgtttgctgatgccacccgggatgatggcactcagctggctgactaccagtcctttgcagtcactgtggccacatccttggtcattgtggttagcgtgcagattgggctcgacacaggctactggacggccatcaaccacttcttcatctggggaagccttgctgtttactttgccatcctctttgccatgcacagcaatgggctcttcgacatgtttcccaaccagttccggtttgtggggaatgcccagaacaccttggcccagcccacggtgtggctgaccattgtgctcaccacagtcgtctgcatcatgcccgtggttgccttccgattcctcaggctcaacctgaagccggatctctccgacacggtccgctacacacagctcgtgaggaagaagcagaaggcccagcaccgctgcatgcggcgggttggccgcactggctcccggcgctccggctatgccttctcccatcaggagggcttcggggagctcatcatgtctggcaagaacatgcggctgagctctctcgcgctctccagcttcaccacccgctccagctccagctggattgagagcctgcgcaggaagaagagtgacagtgccagtagccccagtggcggtgccgacaagcccctcaagggctgaaggccgaggatggatgccctgtgccagtgaccagagcacccagggctggccagtcactgagggaacagcgtctcggaactgctggtcctcattccttgcttcccgtccccccggtagactctgtcctgctggtcccaccacacatggctgggacatctgttcccagctgtaggcccttccaccagctggggagctagagggagcaggcccaagggcagagcagaggctgaggcacggggagccagccccactcggggaccagaagtggaaccaaaaacaagaaaaaactgtgagagattgtgtctgcccctgccctgcctgggacccacagggagactataatctccttatttttttactcctactccccagaggggccctagtgcctctgttcctgaattacataagaatgtaccatgccgggaagccagagacctgcaggggcctcggcccctcacatcgtgtatgtctctccttgatttgtgttgtgtccagtttggttttgtctttttttatttggcaagtggaggaggcttttatgtgacttttatgttgtggttggtgtcttaactctcctgggaaaaggaggctggcacacactgggatgccgcagcctggccggctgtggggtggtttgggaggatccatgtcggctctgcctgcagtgaccagtgctctgtggggcagaggagctgaccagggagggaggtacccatgagcagagggtagtgggagagtgtaaaggagggtttggtcctgtctgcttcctcaccttgagagtaaagtgctgccctctgcccccaacacacacacatatcaattcctggattccttagtcctgctggccttgggctggagcctaggaaagtggcccccaaatccttagtgagctaaagctgggtctgaaatttggtcagtggggaggggtagttttcttttcttttttctttttctttttttctttttttttttgagatggagtctcactcttgtcacctaggcaagagtgcaatggcacaatctcagctcactgcaacctccacctcctgggttcaagcgattctcctgcctcagcctcctgagtagctgggattacaggcacacaccaccacgcttggttaatttttgtatttttagtagagatgtttcaccatgttggccaggctagtcttgaattcctgacctcctgacctgcccacctcaacctcccaaagtgctgagattacaggcgtgagccaccacacccagctcagggaggcgtagttttctttaattttaaatttaaacccaagtttattggcagactcccttttgacctccctttgcctccccatctggtgctttcttgcatctacaccccagggccctgtggtggggctgcagggggaagctgtgcacctgagatgaggctggaacgggaattggcctctctgctcccttcttcagtaagcaaggagccccgcccctcaggcccagcctctggcaagaggtggtggaatccttgtgccgggtagtagaggaggataagggcaaaaccaggcccaggccagtgcctggcttggtctggatgggacactgtcagagtttggccacagcctgtcctttacttcatccacacctatgaagctattccctaaataaggcatttcccaagttagtcgctacctaatcagccttgagaagaatcctttcctcttctttgatagtgggtcgggggattcttcaggaatggtttggagctgggagtgggtagggggattttaaatgttccatatgggagccccaaaggaactggatgggctgcagtgaggtgggggcgggtgggcagggaatgggagaggggaagtcttggcagggaaatcccttttggccacacagtttacaaacccagtatcatgtctgtctgtgtgtctctcaaggtgagagtctgatttttataccaaagaggaaatgattttttttcatattttgtttgtctatattatataaatatatatatacagtatatatatatatatattattttttggttctctctcgttttttagggagggaagaaagtaccaagttgcattgagctgtaattaaggaacattataatttatgacacatttctatacttgcaaaaattatatcattttatggatataagagaaaaatgcctttttataaaatttcaatttctgaaaaaaagtaatttgtctcttttctgatgtttaaccaagactggt

SEQ ID NO: 243 - DNA, 1670 bp, Homo sapien
gtgccagcctccttttcccaggagagttaagacacacactgggatgccgcagcctggccggctgtggggtggtttgggaggatccatgtcggctctgcctgcagtgaccagtgctctgtggggcagaggagctgaccagggagggaggtacccatgagcagagggtagtgggagagtgtaaaggagggtttggtcctgtctgcttcctcaccttgagagtaaagtgctgccctctgcccccaacacacacacatatcaattcctggattccttagtcctgctggccttgggctggagcctaggaaagtggcccccaaatccttagtgagctaaagctgggtctgaaatttggtcagtggggaggggtagttttcttttcttttttctttttctttttttctttttttttttgagatggagtctcactcttgtcacctaggcaagagtgcaatggcacaatctcagctcactgcaacctccacctcctgggttcaagcgattctcctgcctcagcctcctgagtagctgggattacaggcacacaccaccacgcttggttaatttttgtatttttagtagagatgtttcaccatgttggccaggctagtcttgaattcctgacctcctgacctgcccacctcaacctcccaaagtgctgagattacaggcgtgagccaccacacccagctcagggaggcgtagttttctttaattttaaatttaaacccaagtttattggcagactcccttttgacctccctttgcctccccatctggtgctttcttgcatctacaccccagggccctgtggtggggctgcagggggaagctgtgcacctgagatgaggctggaacgggaattggcctctctgctcccttcttcagtaagcaaggagccccgcccctcaggcccagcctctggcaagaggtggtggaatccttgtgccgggtagtagaggaggataagggcaaaaccaggcccaggccagtgcctggcttggtctggatgggacactgtcagagtttggccacagcctgtcctttacttcatccacacctatgaagctattccctaaataaggcatttcccaagttagtcgctacctaatcagccttgagaagaatcctttcctcttctttgatagtgggtcgggggattcttcaggaatggtttggagctgggagtgggtagggggattttaaatgttccatatgggagccccaaaggaactggatgggctgcagtgaggtgggggcgggtgggcagggaatgggagaggggaagtcttggcagggaaatcccttttggccacacagtttacaaacccagtatcatgtctgtctgtgtgtctctcaaggtgagagtctgatttttataccaaagaggaaatgattttttttcatattttgtttgtctatattatataaatatatatatacagtatatatatatatatattattttttggttctctctcgttttttagggagggaagaaagtaccaagttgcattgagctgtaattaaggaacattataatttatgacacatttctatacttgcaaaaattatatcattttatggatataagagaaaaatgcctttttataaaatttcaatttctgaaaaaaagtaatttgtctcttttctgatgtttaaccaagactggt

SEQ ID NO: 244 - DNA, 2415 bp, Homo sapien
gcagtagctgtgcagtgacagtgtgcctatgcagacagagggagcagtgaatagcaatagggtgtttccaccatggtcttcactcaggccccggctgaaatcatgggccacctccggatacgcagcctcctggcccggcagtgcctggcagagtttctgggtgtgtttgtactcatgctcctcacccaaggagctgtggcccaggctgtcaccagtggagaaaccaaaggcaacttcttcaccatgtttctggctggctctctggccgttacgatagccatctacgtgggtggtaacgtctcaggggcccacctgaatccagccttctccctggccatgtgcatcgttggacgcctcccctgggtcaagctccccatttacatcttggtgcagttgctgtctgctttctgtgcttcgggagccacctatgttctctaccatgatgccctacagaactatacaggtgggaacctgacagtgactggccccaaggagacagcctccatttttgccacctatcctgccccctatctgtccctgaacaatggcttcctggatcaggttctgggcaccgggatgctgattgtggggctcttggccatcctggacagacggaacaagggagtccctgcgggtctggagcctgtggtggtggggatgctgatcctggccctcgggttatccatgggtgccaactgcgggattccactcaaccctgcccgggacctgggcccacgtctcttcacctacgtggctggctggggtcctgaagtcttcagtgctggtaatggctggtggtgggtgcctgtggtggcccctctggtgggggccaccgttggcacagccacttaccagctgttggtggctctgcaccaccctgagggcccagagccagctcaggatctggtgtctgctcaacacaaagcctcagagttggaaactcctgcctcagctcagatgctggagtgtaagctatgattaggacaaccctcacttcactcatggaccctggagccagccactgaccccgcctgggaacaacagtcattcttcctctttgttaatgtgccagaacctgggaggcttctctgtttatctgtttggcatcccttcctcctaaactaagaaggatcctggacagggagaagtggaggaggataagggtctcccatgggattgctgggatcttgctgggtgagatggcagtgtgtgcaaaaaagcgccccccagaagaagaaaggagggcgcgggctaatgaccgagaatacaatgagaaattccagtatgcgagtaactgcatcaagacctccaagtacaatattctcaccttcctgcctgtcaacctctttgagcagttccaggaagttgccaacacttacttcctgttcctcctcattctgcagttgatcccccagatctcttccctgtcctggttcaccaccattgtgcctttggttcttgtcctcaccatcacagctgttaaagatgccactgatgactatttccgccacaagagcgataaccaggtgaataaccgccagtctcaggtgctgatcaatggaatcctccagcaggagcagtggatgaatgtctgtgttggtgatattatcaagctagaaaataaccagtttgtggcggtaagggacagggtacccctctaggcctgtaggttcttcctcttctttgtgagaaaaggatgaatctttcctgatttactgttgcctcttaaacacccgtggcaggaatctttctcacaccaggggcttctgtgtcatgctgatatgcctggaactagccatttatgcacctggaactaagcaaaccaagaatgcttagtggaaggagccaccattacagcccactgggggtggaggtttgcatatttggacttctcattagtttttctctctaggcggatctcctcctcctttccagcagtgagccccatgggctgtgttacatagagacagcagaacttgatggcgagaccaacatgaaagtacgtcaggcgattccagtcacctcagaattgggagacatcagtaagcttgccaagtttgacggtgaagtgatctgtgaacctcccaacaacaaactggacaaattcagcggaaccctctactggaaggaaaataagttccctctgagcaaccagaacatgctgctgcggggctgtgtgctgcgaaacaccgagtggtgcttcgggctggtcatctttgcaggtcccgacactaagctgatgcaaaacagcggcagaacaaagttcaaaagaacgagtatcgatcgcctaatgaataccctggtgctctgggtgaggcgccccacatctggctccctgcccctgccctctcttctccttgggtgctccttttcctttcctctttcttctttggtcagtagacttcaggtttggct

SEQ ID NO: 245 - DNA, 2213 bp, Homo sapien
gcagtagctgtgcagtgacagtgtgcctatgcagacagagggagcagtgaatagcaatagggtgtttccaccatggtcttcactcaggccccggctgaaatcatgggccacctccggatacgcagcctcctggcccggcagtgcctggcagagtttctgggtgtgtttgtactcatgctcctcacccaaggagctgtggcccaggctgtcaccagtggagaaaccaaaggcaacttcttcaccatgtttctggctggctctctggccgttacgatagccatctacgtgggtggtaacgtctcaggggcccacctgaatccagccttctccctggccatgtgcatcgttggacgcctcccctgggtcaagctccccatttacatcttggtgcagttgctgtctgctttctgtgcttcgggagccacctatgttctctaccatgatgccctacagaactatacaggtgggaacctgacagtgactggccccaaggagacagcctccatttttgccacctatcctgccccctatctgtccctgaacaatggcttcctggatcaggttctgggcaccgggatgctgattgtggggctcttggccatcctggacagacggaacaagggagtccctgcgggtctggagcctgtggtggtggggatgctgatcctggccctcgggttatccatgggtgccaactgcgggattccactcaaccctgcccgggacctgggcccacgtctcttcacctacgtggctggctggggtcctgaagtcttcagtgctggtaatggctggtggtgggtgcctgtggtggcccctctggtgggggccaccgttggcacagccacttaccagctgttggtggctctgcaccaccctgagggcccagagccagctcaggatctggtgtctgctcaacacaaagcctcagagttggaaactcctgcctcagctcagatgctggagtgtaagctatgattaggacaaccctcacttcactcatggaccctggagccagccactgaccccgcctgggaacaacagtcattcttcctctttgttaatgtgccagaacctgggaggcttctctgtttatctgtttggcatcccttcctcctaaactaagaaggatcctggacagggagaagtggaggaggataagggtctcccatgggattgctgggatcttgctgggtgagatggcagtgtgtgcaaaaaagcgccccccagaagaagaaaggagggcgcgggctaatgaccgagaatacaatgagaaattccagtatgcgagtaactgcatcaagacctccaagtacaatattctcaccttcctgcctgtcaacctctttgagcagttccaggaagttgccaacacttacttcctgttcctcctcattctgcagttgatcccccagatctcttccctgtcctggttcaccaccattgtgcctttggttcttgtcctcaccatcacagctgttaaagatgccactgatgactatttccgccacaagagcgataaccaggtgaataaccgccagtctcaggtgctgatcaatggaatcctccagcaggagcagtggatgaatgtctgtgttggtgatattatcaagctagaaaataaccagtttgtggcggtaagggacagggtacccctctaggcctgtaggttcttcctcttctttgtgagaaaaggatgaatctttcctgatttactgttgcctcttaaacacccgtggcaggaatctttctcacaccaggggcttctgtgtcatgctgatatgcctggaactagccatttatgcacctggaactaagcaaaccaagaatgcttagtggaaggagccaccattacagcccactgggggtggaggtttgcatatttggacttctcattagtttttctctctaggcggatctcctcctcctttccagcagtgagccccatgggctgtgttacatagagacagcagaacttgatgggtaagtggcatgctcagtgtcagccctctccttctgtctctttggaggtaaaaagattgtctttgaatgaggttctcaggcctgggctctgtctgaatttggaaaaattaggggtaagaaaggctttggatgggatgtgtgaagtgttattcaaccagtatttgctgggctgagcagttatgcaccatgcttaggtgtcaccaggtagaatttagaggatggggagaggt

SEQ ID NO: 246 - DNA, 947 bp, Homo sapien
tttttttttaaamttgggaaacaaacttatcttcataaacgtagatttcttttttgaaacagggtcttgctttgttgcccaggctggtctcaaactcctgacctcaggtgatccatccgcctcaacctcccaaaatgctgggattacaggcttgagccactgcgcccagcccataatagtttttttttttttttaattatttttcatttaacattcagctgttaccaaaatctcatagtgttttaagaaagtttatgaatctgtgttgggccacatgtggcccagagaccatgggttggacaagcttgcactagagcatctgagcttttgagggctcaagggatgaatacatcacagatgcacttggttttgagggcttcctacatgtcagcctcgcctgtgcttctcattcctccccagatttttggattcctggtttgcatgggggtgatcctggccattggcaatgccatctgggagcacgaggtggggatgcgtttccaggtctacctgccgtgggatgaggcagtggacagtgccttcttctctggcttcctctccttctggtcctacatcatcatcctcaacaccgttgtgcccatttcactctatgtcaggtatgtgccttctctgacctggggtctctccagggagtcaggcggtcccatagaacttttcttttctatgaagatgaagtccttgagaagtaacgagaagtcctcttcttcctgtactgtaaacatttgatgttatctgtttatctttgtgggcagagcaaactttttaccacagtttcctggtacttgggactgtattagagaaaaaaaaatattgatttattcagcacctatttattacatgcctactgtgtacaaagaagtgtgctaggtgccatcacaaataaaagatgaattaggaatggatctccttccttctaggagcttacg

SEQ ID NO: 247 - DNA, 7532 bp, Homo sapien
gcagtagctgtgcagtgacagtgtgcctatgcagacagagggagcagtgaatagcaatagggtgtttccaccatggtcttcactcaggccccggctgaaatcatgggccacctccggatacgcagcctcctggcccggcagtgcctggcagagtttctgggtgtgtttgtactcatgctcctcacccaaggagctgtggcccaggctgtcaccagtggagaaaccaaaggcaacttcttcaccatgtttctggctggctctctggccgttacgatagccatctacgtgggtggtaacgtctcaggggcccacctgaatccagccttctccctggccatgtgcatcgttggacgcctcccctgggtcaagctccccatttacatcttggtgcagttgctgtctgctttctgtgcttcgggagccacctatgttctctaccatgatgccctacagaactatacaggtgggaacctgacagtgactggccccaaggagacagcctccatttttgccacctatcctgccccctatctgtccctgaacaatggcttcctggatcaggttctgggcaccgggatgctgattgtggggctcttggccatcctggacagacggaacaagggagtccctgcgggtctggagcctgtggtggtggggatgctgatcctggccctcgggttatccatgggtgccaactgcgggattccactcaaccctgcccgggacctgggcccacgtctcttcacctacgtggctggctggggtcctgaagtcttcagtgctggtaatggctggtggtgggtgcctgtggtggcccctctggtgggggccaccgttggcacagccacttaccagctgttggtggctctgcaccaccctgagggcccagagccagctcaggatctggtgtctgctcaacacaaagcctcagagttggaaactcctgcctcagctcagatgctggagtgtaagctatgattaggacaaccctcacttcactcatggaccctggagccagccactgaccccgcctgggaacaacagtcattcttcctctttgttaatgtgccagaacctgggaggcttctctgtttatctgtttggcatcccttcctcctaaactaagaaggatcctggacagggagaagtggaggaggataagggtctcccatgggattgctgggatcttgctgggtgagatggcagtgtgtgcaaaaaagcgccccccagaagaagaaaggagggcgcgggctaatgaccgagaatacaatgagaaattccagtatgcgagtaactgcatcaagacctccaagtacaatattctcaccttcctgcctgtcaacctctttgagcagttccaggaagttgccaacacttacttcctgttcctcctcattctgcagttgatcccccagatctcttccctgtcctggttcaccaccattgtgcctttggttcttgtcctcaccatcacagctgttaaagatgccactgatgactatttccgccacaagagcgataaccaggtgaataaccgccagtctcaggtgctgatcaatggaatcctccagcaggagcagtggatgaatgtctgtgttggtgatattatcaagctagaaaataaccagtttgtggcggtaagggacagggtacccctctaggcctgtaggttcttcctcttctttgtgagaaaaggatgaatctttcctgatttactgttgcctcttaaacacccgtggcaggaatctttctcacaccaggggcttctgtgtcatgctgatatgcctggaactagccatttatgcacctggaactaagcaaaccaagaatgcttagtggaaggagccaccattacagcccactgggggtggaggtttgcatatttggacttctcattagtttttctctctaggcggatctcctcctcctttccagcagtgagccccatgggctgtgttacatagagacagcagaacttgatggcgagaccaacatgaaagtacgtcaggcgattccagtcacctcagaattgggagacatcagtaagcttgccaagtttgacggtgaagtgatctgtgaacctcccaacaacaaactggacaaattcagcggaaccctctactggaaggaaaataagttccctctgagcaaccagaacatgctgctgcggggctgtgtgctgcgaaacaccgagtggtgcttcgggctggtcatctttgcaggtcccgacactaagctgatgcaaaacagcggcagaacaaagttcaaaagaacgagtatcgatcgcctaatgaataccctggtgctctggatttttggattcctggtttgcatgggggtgatcctggccattggcaatgccatctgggagcacgaggtggggatgcgtttccaggtctacctgccgtgggatgaggcagtggacagtgccttcttctctggcttcctctccttctggtcctacatcatcatcctcaacaccgttgtgcccatttcactctatgtcagtgtggaggtcatccgtctgggccacagctacttcatcaactgggataagaagatgttctgcatgaagaagcggacgcctgcagaagcccgcaccaccaccctaaacgaggagctgggccaggtggagtacatcttctccgacaagacgggcaccctcacccagaacatcatggttttcaacaagtgctccatcaatggccacagctatggtgatgtgtttgacgtcctgggacacaaagctgaattgggagagaggcctgaacctgttgacttctccttcaatcctctggctgacaagaagttcttattttgggaccccagcctgctggaggctgtcaagatcggggacccccacacgcatgagttcttccgcctcctttccctgtgtcatactgtcatgtcagaagaaaagaacgaaggagagctgtactacaaagctcagtccccagatgagggggccctggtcaccgcagccaggaactttggttttgttttccgctctcgcacccccaaaacaatcaccgtccatgagatgggcacagccatcacctaccagctgctggccatcctggacttcaacaacatccgcaagcggatgtcggtcatagtgcggaatccagaggggaagatccgactctactgcaaaggggctgacactatcctactggacagactgcaccactccactcaagagctgctcaacaccaccatggaccaccttaatgagtacgcaggggaagggctgaggaccctggtgctggcctacaaggatctggatgaagagtactacgaggagtgggctgagcgacgcctccaggccagcctggcccaggacagccgggaggacaggctggctagcatctatgaggaggttgagaacaacatgatgctgctgggtgcaacggccattgaggacaaacttcagcaaggggttccagagaccattgccctcctgacactggccaacatcaagatttgggtgctaaccggagacaagcaagagacggctgtgaacatcggctattcctgcaagatgctgacggatgacatgactgaggttttcatagtcactggccatactgtcctggaggtgcgggaggagctcaggaaagcccgggagaagatgatggactcatcccgctccgtaggcaacggcttcacctatcaggacaagctttcttcttccaagctaacttctgtcctggaggccgttgctggggagtacgccctggtcataaatggtcacagcctggcccacgcactggaggcagacatggagctggagtttctggagacagcgtgtgcctgcaaagctgtcatctgctgccgggtgacccccttgcagaaggcacaggtggtagaactggtcaagaagtacaagaaggctgtgacgcttgccattggagacggagccaatgatgtcagcatgatcaaaacggctcacattggtgtggggatcagtgggcaggaagggatccaggctgtcttggcctccgattactccttctcccagttcaagttcctgcagcgcctcctgctggtgcatgggcgctggtcctacctgcgaatgtgcaagtttctttgctatttcttctacaaaaactttgctttcaccatggtccacttctggtttggcttcttctgtggcttctcagcccaggtaataaatgttcccagtccactgttgtgcaaatctgtaaacctgagggcagaggttctgtcttgtttatcactcagtcccccagggcctagctattttctggtacatactcttaaaaaatgcttattaaaggaggagagaaggagcctcagaaaatttcttagggttctctgtatgtgacatcagctgtcttcctgtgcctgatgtgtagcaaagaaaggttgcatgctcccttgctccctgttctcttccagaccgtctatgaccagtatttcatcaccctgtataacatcgtgtacacctccctgccagtcctggctatgggggtctttgatcaggatgtccccgagcagcggagcatggagtaccctaagctgtatgagccgggccagctgaaccttctcttcaacaagcgggagttcttcatctgcatcgcccagggcatctacacctccgtgctcatgttcttcattccctatggggtgtttgctgatgccacccgggatgatggcactcagctggctgactaccagtcctttgcagtcactgtggccacatccttggtcattgtggttagcgtgcagattgggctcgacacaggctactggacggccatcaaccacttcttcatctggggaagccttgctgtttactttgccatcctctttgccatgcacagcaatgggctcttcgacatgtttcccaaccagttccggtttgtggggaatgcccagaacaccttggcccagcccacggtgtggctgaccattgtgctcaccacagtcgtctgcatcatgcccgtggttgccttccgattcctcaggctcaacctgaagccggatctctccgacacggtccgctacacacagctcgtgaggaagaagcagaaggcccagcaccgctgcatgcggcgggttggccgcactggctcccggcgctccggctatgccttctcccatcaggagggcttcggggagctcatcatgtctggcaagaacatgcggctgagctctctcgcgctctccagcttcaccacccgctccagctccagctggattgagagcctgcgcaggaagaagagtgacagtgccagtagccccagtggcggtgccgacaagcccctcaagggctgaaggccgaggatggatgccctgtgccagtgaccagagcacccagggctggccagtcactgagggaacagcgtctcggaactgctggtcctcattccttgcttcccgtccccccggtagactctgtcctgctggtcccaccacacatggctgggacatctgttcccagctgtaggcccttccaccagctggggagctagagggagcaggcccaagggcagagcagaggctgaggcacggggagccagccccactcggggaccagaagtggaaccaaaaacaagaaaaaactgtgagagattgtgtctgcccctgccctgcctgggacccacagggagactataatctccttatttttttactcctactccccagaggggccctagtgcctctgttcctgaattacataagaatgtaccatgccgggaagccagagacctgcaggggcctcggcccctcacatcgtgtatgtctctccttgatttgtgttgtgtccagtttggttttgtctttttttatttggcaagtggaggaggcttttatgtgacttttatgttgtggttggtgtcttaactctcctgggaaaaggaggctggcacacactgggatgccgcagcctggccggctgtggggtggtttgggaggatccatgtcggctctgcctgcagtgaccagtgctctgtggggcagaggagctgaccagggagggaggtacccatgagcagagggtagtgggagagtgtaaaggagggtttggtcctgtctgcttcctcaccttgagagtaaagtgctgccctctgcccccaacacacacacatatcaattcctggattccttagtcctgctggccttgggctggagcctaggaaagtggcccccaaatccttagtgagctaaagctgggtctgaaatttggtcagtggggaggggtagttttcttttcttttttctttttctttttttctttttttttttgagatggagtctcactcttgtcacctaggcaagagtgcaatggcacaatctcagctcactgcaacctccacctcctgggttcaagcgattctcctgcctcagcctcctgagtagctgggattacaggcacacaccaccacgcttggttaatttttgtatttttagtagagatgtttcaccatgttggccaggctagtcttgaattcctgacctcctgacctgcccacctcaacctcccaaagtgctgagattacaggcgtgagccaccacacccagctcagggaggcgtagttttctttaattttaaatttaaacccaagtttattggcagactcccttttgacctccctttgcctccccatctggtgctttcttgcatctacaccccagggccctgtggtggggctgcagggggaagctgtgcacctgagatgaggctggaacgggaattggcctctctgctcccttcttcagtaagcaaggagccccgcccctcaggcccagcctctggcaagaggtggtggaatccttgtgccgggtagtagaggaggataagggcaaaaccaggcccaggccagtgcctggcttggtctggatgggacactgtcagagtttggccacagcctgtcctttacttcatccacacctatgaagctattccctaaataaggcatttcccaagttagtcgctacctaatcagccttgagaagaatcctttcctcttctttgatagtgggtcgggggattcttcaggaatggtttggagctgggagtgggtagggggattttaaatgttccatatgggagccccaaaggaactggatgggctgcagtgaggtgggggcgggtgggcagggaatgggagaggggaagtcttggcagggaaatcccttttggccacacagtttacaaacccagtatcatgtctgtctgtgtgtctctcaaggtgagagtctgatttttataccaaagaggaaatgattttttttcatattttgtttgtctatattatataaatatatatatacagtatatatatatatatattattttttggttctctctcgttttttagggagggaagaaagtaccaagttgcattgagctgtaattaaggaacattataatttatgacacatttctatacttgcaaaaattatatcattttatggatataagagaaaaatgcctttttataaaatttcaatttctgaaaaaaagtaatttgtctcttttctgatgtttaaccaagactggt

SEQ ID NO: 248 - DNA, 4803 bp, Homo sapien
gcagtagctgtgcagtgacagtgtgcctatgcagacagagggagcagtgaatagcaatagggtgtttccaccatggtcttcactcaggccccggctgaaatcatgggccacctccggatacgcagcctcctggcccggcagtgcctggcagagtttctgggtgtgtttgtactcatgctcctcacccaaggagctgtggcccaggctgtcaccagtggagaaaccaaaggcaacttcttcaccatgtttctggctggctctctggccgttacgatagccatctacgtgggtggtaacgtctcaggggcccacctgaatccagccttctccctggccatgtgcatcgttggacgcctcccctgggtcaagctccccatttacatcttggtgcagttgctgtctgctttctgtgcttcgggagccacctatgttctctaccatgatgccctacagaactatacaggtgggaacctgacagtgactggccccaaggagacagcctccatttttgccacctatcctgccccctatctgtccctgaacaatggcttcctggatcaggttctgggcaccgggatgctgattgtggggctcttggccatcctggacagacggaacaagggagtccctgcgggtctggagcctgtggtggtggggatgctgatcctggccctcgggttatccatgggtgccaactgcgggattccactcaaccctgcccgggacctgggcccacgtctcttcacctacgtggctggctggggtcctgaagtcttcagtgctggtaatggctggtggtgggtgcctgtggtggcccctctggtgggggccaccgttggcacagccacttaccagctgttggtggctctgcaccaccctgagggcccagagccagctcaggatctggtgtctgctcaacacaaagcctcagagttggaaactcctgcctcagctcagatgctggagtgtaagctatgattaggacaaccctcacttcactcatggaccctggagccagccactgaccccgcctgggaacaacagtcattcttcctctttgttaatgtgccagaacctgggaggcttctctgtttatctgtttggcatcccttcctcctaaactaagaaggatcctggacagggagaagtggaggaggataagggtctcccatgggattgctgggatcttgctgggtgagatggcagtgtgtgcaaaaaagcgccccccagaagaagaaaggagggcgcgggctaatgaccgagaatacaatgagaaattccagtatgcgagtaactgcatcaagacctccaagtacaatattctcaccttcctgcctgtcaacctctttgagcagttccaggaagttgccaacacttacttcctgttcctcctcattctgcagttgatcccccagatctcttccctgtcctggttcaccaccattgtgcctttggttcttgtcctcaccatcacagctgttaaagatgccactgatgactatttccgccacaagagcgataaccaggtgaataaccgccagtctcaggtgctgatcaatggaatcctccagcaggagcagtggatgaatgtctgtgttggtgatattatcaagctagaaaataaccagtttgtggcggtaagggacagggtacccctctaggcctgtaggttcttcctcttctttgtgagaaaaggatgaatctttcctgatttactgttgcctcttaaacacccgtggcaggaatctttctcacaccaggggcttctgtgtcatgctgatatgcctggaactagccatttatgcacctggaactaagcaaaccaagaatgcttagtggaaggagccaccattacagcccactgggggtggaggtttgcatatttggacttctcattagtttttctctctaggcggatctcctcctcctttccagcagtgagccccatgggctgtgttacatagagacagcagaacttgatggcgagaccaacatgaaagtacgtcaggcgattccagtcacctcagaattgggagacatcagtaagcttgccaagtttgacggtgaagtgatctgtgaacctcccaacaacaaactggacaaattcagcggaaccctctactggaaggaaaataagttccctctgagcaaccagaacatgctgctgcggggctgtgtgctgcgaaacaccgagtggtgcttcgggctggtcatctttgcaggtcccgacactaagctgatgcaaaacagcggcagaacaaagttcaaaagaacgagtatcgatcgcctaatgaataccctggtgctctggatttttggattcctggtttgcatgggggtgatcctggccattggcaatgccatctgggagcacgaggtggggatgcgtttccaggtctacctgccgtgggatgaggcagtggacagtgccttcttctctggcttcctctccttctggtcctacatcatcatcctcaacaccgttgtgcccatttcactctatgtcagtgtggaggtcatccgtctgggccacagctacttcatcaactgggataagaagatgttctgcatgaagaagcggacgcctgcagaagcccgcaccaccaccctaaacgaggagctgggccaggtggagtacatcttctccgacaagacgggcaccctcacccagaacatcatggttttcaacaagtgctccatcaatggccacagctatggtgatgtgtttgacgtcctgggacacaaagctgaattgggagagaggcctgaacctgttgacttctccttcaatcctctggctgacaagaagttcttattttgggaccccagcctgctggaggctgtcaagatcggggacccccacacgcatgagttcttccgcctcctttccctgtgtcatactgtcatgtcagaagaaaagaacgaaggagagctgtactacaaagctcagtccccagatgagggggccctggtcaccgcagccaggaactttggttttgttttccgctctcgcacccccaaaacaatcaccgtccatgagatgggcacagccatcacctaccagctgctggccatcctggacttcaacaacatccgcaagcggatgtcggtcatagtgcggaatccagaggggaagatccgactctactgcaaaggggctgacactatcctactggacagactgcaccactccactcaagagctgctcaacaccaccatggaccaccttaatgagtacgcaggggaagggctgaggaccctggtgctggcctacaaggatctggatgaagagtactacgaggagtgggctgagcgacgcctccaggccagcctggcccaggacagccgggaggacaggctggctagcatctatgaggaggttgagaacaacatgatgctgctgggtgcaacggccattgaggacaaacttcagcaaggggttccagagaccattgccctcctgacactggccaacatcaagatttgggtgctaaccggagacaagcaagagacggctgtgaacatcggctattcctgcaagatgctgacggatgacatgactgaggttttcatagtcactggccatactgtcctggaggtgcgggaggagctcaggaaagcccgggagaagatgatggactcatcccgctccgtaggcaacggcttcacctatcaggacaagctttcttcttccaagctaacttctgtcctggaggccgttgctggggagtacgccctggtcataaatggtcacagcctggcccacgcactggaggcagacatggagctggagtttctggagacagcgtgtgcctgcaaagctgtcatctgctgccgggtgacccccttgcagaaggcacaggtggtagaactggtcaagaagtacaagaaggctgtgacgcttgccattggagacggagccaatgatgtcagcatgatcaaaacggctcacattggtgtggggatcagtgggcaggaagggatccaggctgtcttggcctccgattactccttctcccagttcaagttcctgcagcgcctcctgctggtgcatgggcgctggtcctacctgcgaatgtgcaagtttctttgctatttcttctacaaaaactttgctttcaccatggtccacttctggtttggcttcttctgtggcttctcagcccaggtaataaatgttcccagtccactgttgtgcaaatctgtaaacctgagggcagaggttctgtcttgtttatcactcagtcccccagggcctagctattttctggtacatactcttaaaaaatgcttattaaaggaggagagaaggagcctcagaaaatttcttagggttctctgtatgtgacatcagctgtcttcctgtgcctgatgtgtagcaaagaaaggttgcatgctcccttgctccctgttctcttccagaccgtctatgaccagtatttcatcaccctgtataacatcgtgtacacctccctgccagtcctggctatgggggtctttgatcaggtatgggggagtttgatgatcagatgggatgcggggaaggtcactgcttgaaggagtcacatagacgtggtgtgtgacacttgtgcccatttcctgtggccactgggaaggcagttctttcagccggggaaggtgtggctggttctccctcctggctgcagctgatctagaactctcttgggttgctgaactaagttagtctgggggtagctggcttgaggttggttctagctgccaaagactttggaaaggaggaggcagggacagagtcagagtctgcccttggtcatccagggt

SEQ ID NO: 249 - DNA, 2838 bp, Homo sapien
gcagtagctgtgcagtgacagtgtgcctatgcagacagagggagcagtgaatagcaatagggtgtttccaccatggtcttcactcaggccccggctgaaatcatgggccacctccggatacgcagcctcctggcccggcagtgcctggcagagtttctgggtgtgtttgtactcatgctcctcacccaaggagctgtggcccaggctgtcaccagtggagaaaccaaaggcaacttcttcaccatgtttctggctggctctctggccgttacgatagccatctacgtgggtggtaacgtctcaggggcccacctgaatccagccttctccctggccatgtgcatcgttggacgcctcccctgggtcaagctccccatttacatcttggtgcagttgctgtctgctttctgtgcttcgggagccacctatgttctctaccatgatgccctacagaactatacaggtgggaacctgacagtgactggccccaaggagacagcctccatttttgccacctatcctgccccctatctgtccctgaacaatggcttcctggatcaggttctgggcaccgggatgctgattgtggggctcttggccatcctggacagacggaacaagggagtccctgcgggtctggagcctgtggtggtggggatgctgatcctggccctcgggttatccatgggtgccaactgcgggattccactcaaccctgcccgggacctgggcccacgtctcttcacctacgtggctggctggggtcctgaagtcttcagtgctggtaatggctggtggtgggtgcctgtggtggcccctctggtgggggccaccgttggcacagccacttaccagctgttggtggctctgcaccaccctgagggcccagagccagctcaggatctggtgtctgctcaacacaaagcctcagagttggaaactcctgcctcagctcagatgctggagtgtaagctatgattaggacaaccctcacttcactcatggaccctggagccagccactgaccccgcctgggaacaacagtcattcttcctctttgttaatgtgccagaacctgggaggcttctctgtttatctgtttggcatcccttcctcctaaactaagaaggatcctggacagggagaagtggaggaggataagggtctcccatgggattgctgggatcttgctgggtgagatggcagtgtgtgcaaaaaagcgccccccagaagaagaaaggagggcgcgggctaatgaccgagaatacaatgagaaattccagtatgcgagtaactgcatcaagacctccaagtacaatattctcaccttcctgcctgtcaacctctttgagcagttccaggaagttgccaacacttacttcctgttcctcctcattctgcagttgatcccccagatctcttccctgtcctggttcaccaccattgtgcctttggttcttgtcctcaccatcacagctgttaaagatgccactgatgactatttccgccacaagagcgataaccaggtgaataaccgccagtctcaggtgctgatcaatggaatcctccagcaggagcagtggatgaatgtctgtgttggtgatattatcaagctagaaaataaccagtttgtggcggtaagggacagggtacccctctaggcctgtaggttcttcctcttctttgtgagaaaaggatgaatctttcctgatttactgttgcctcttaaacacccgtggcaggaatctttctcacaccaggggcttctgtgtcatgctgatatgcctggaactagccatttatgcacctggaactaagcaaaccaagaatgcttagtggaaggagccaccattacagcccactgggggtggaggtttgcatatttggacttctcattagtttttctctctaggcggatctcctcctcctttccagcagtgagccccatgggctgtgttacatagagacagcagaacttgatggcgagaccaacatgaaagtacgtcaggcgattccagtcacctcagaattgggagacatcagtaagcttgccaagtttgacggtgaagtgatctgtgaacctcccaacaacaaactggacaaattcagcggaaccctctactggaaggaaaataagttccctctgagcaaccagaacatgctgctgcggggctgtgtgctgcgaaacaccgagtggtgcttcgggctggtcatctttgcaggtcccgacactaagctgatgcaaaacagcggcagaacaaagttcaaaagaacgagtatcgatcgcctaatgaataccctggtgctctggatttttggattcctggtttgcatgggggtgatcctggccattggcaatgccatctgggagcacgaggtggggatgcgtttccaggtctacctgccgtgggatgaggcagtggacagtgccttcttctctggcttcctctccttctggtcctacatcatcatcctcaacaccgttgtgcccatttcactctatgtcaggtatgtgccttctctgacctggggtctctccagggagtcaggcggtcccatagaacttttcttttctatgaagatgaagtccttgagaagtaacgagaagtcctcttcttcctgtactgtaaacatttgatgttatctgtttatctttgtgggcagagcaaactttttaccacagtttcctggtacttgggactgtattagagaaaaaaaaatattgatttattcagcacctatttattacatgcctactgtgtacaaagaagtgtgctaggtgccatcacaaataaaagatgaattaggaatggatctccttccttctaggagcttacg

SEQ ID NO: 250 - DNA, 2297 bp, Homo sapien
gcagtagctgtgcagtgacagtgtgcctatgcagacagagggagcagtgaatagcaatagggtgtttccaccatggtcttcactcaggccccggctgaaatcatgggccacctccggatacgcagcctcctggcccggcagtgcctggcagagtttctgggtgtgtttgtactcatgctcctcacccaaggagctgtggcccaggctgtcaccagtggagaaaccaaaggcaacttcttcaccatgtttctggctggctctctggccgttacgatagccatctacgtgggtggtaacgtctcaggggcccacctgaatccagccttctccctggccatgtgcatcgttggacgcctcccctgggtcaagctccccatttacatcttggtgcagttgctgtctgctttctgtgcttcgggagccacctatgttctctaccatgatgccctacagaactatacaggtgggaacctgacagtgactggccccaaggagacagcctccatttttgccacctatcctgccccctatctgtccctgaacaatggcttcctggatcaggttctgggcaccgggatgctgattgtggggctcttggccatcctggacagacggaacaagggagtccctgcgggtctggagcctgtggtggtggggatgctgatcctggccctcgggttatccatgggtgccaactgcgggattccactcaaccctgcccgggacctgggcccacgtctcttcacctacgtggctggctggggtcctgaagtcttcagtgctggtaatggctggtggtgggtgcctgtggtggcccctctggtgggggccaccgttggcacagccacttaccagctgttggtggctctgcaccaccctgagggcccagagccagctcaggatctggtgtctgctcaacacaaagcctcagagttggaaactcctgcctcagctcagatgctggagtgtaagctatgattaggacaaccctcacttcactcatggaccctggagccagccactgaccccgcctgggaacaacagtcattcttcctctttgttaatgtgccagaacctgggaggcttctctgtttatctgtttggcatcccttcctcctaaactaagaaggatcctggacagggagaagtggaggaggataagggtctcccatgggattgctgggatcttgctgggtgagatggcagtgtgtgcaaaaaagcgccccccagaagaagaaaggagggcgcgggctaatgaccgagaatacaatgagaaattccagtatgcgagtaactgcatcaagacctccaagtacaatattctcaccttcctgcctgtcaacctctttgagcagttccaggaagttgccaacacttacttcctgttcctcctcattctgcagttgatcccccagatctcttccctgtcctggttcaccaccattgtgcctttggttcttgtcctcaccatcacagctgttaaagatgccactgatgactatttccgccacaagagcgataaccaggtgaataaccgccagtctcaggtgctgatcaatggaatcctccagcaggagcagtggatgaatgtctgtgttggtgatattatcaagctagaaaataaccagtttgtggcggtaagggacagggtacccctctaggcctgtaggttcttcctcttctttgtgagaaaaggatgaatctttcctgatttactgttgcctcttaaacacccgtggcaggaatctttctcacaccaggggcttctgtgtcatgctgatatgcctggaactagccatttatgcacctggaactaagcaaaccaagaatgcttagtggaaggagccaccattacagcccactgggggtggaggtttgcatatttggacttctcattagtttttctctctaggcggatctcctcctcctttccagcagtgagccccatgggctgtgttacatagagacagcagaacttgatggcgagaccaacatgaaagtacgtcaggcgattccagtcacctcagaattgggagacatcagtaagcttgccaagtttgacggtgaagtgatctgtgaacctcccaacaacaaactggacaaattcagctgccattttcttcttagccacctcctcacaccattttaaatggacaggtgtgtgtaggggcccgtcctgggccagccagctgctcggcctgcaactttggactagaaatcgacactctgccccatgccgcagttttctcctctatattttttctgaaatttttttttgtagagactgcctcgccaag

SEQ ID NO: 251 - DNA, 1369 bp, Homo sapien
  misc_feature (480)..(501): n=a,c,g or t
gggcacatctatgtcccttctttccagatttcactctcaagatgcaactggtaggcccaataaccagtctgtgttccttcgagaccagtaagttttaagggatttggtataaaccctggcatgagatatttgtgccaagtaccatttcggattggtttacacatctgaagtatggctgagaattctgcaattatctagtatattaatcatcttagaaaactcaggaccctatgacttgtccaccctgctttagaaataaaaatgtatatggttacatcgaacctacaatttactgtgtttatataaacaccccaggcatatttcctttcaaaaatgaaatgaatgatatgatttttttgtctcctttaagctttggaggaaggaagtaaactaatgaactttatgctcttgtaaatgtaatgctttgcatcatgggacaccaggtcaggtttgtgcatttacttaagtttgtgtgcactnnnnnnnnnnnnnnnnnnnnnncaattaatttgtcaggtaaattacagcatataggaattaccctcccactgccccttctttctggcaagcaatactgtttaaaacacatactcatgatcagaattgggctaaaacattttgtagagctttatttatttaatgagataccactaaagccttaatactgtaaggcaaatattgcagtgaatgccagtatttcagtatatagtagcatatccttgcctttcagtctgttaagattgactaacatttaattaccttgcctatgttaaaaaaggaaagaaattaccttatagggatatgcaagctcctgaggtttctcagctgtgagcccagccaagttgccctcctccaactggctacttccctcctcaacacacagaaccttatacacaacagtaaataaccctcaataaatttgaatcttatctcaatctaaagacaccaccatcattatgggggaatgttgttagtcctcaaaacctcagtcagtttagaacaacacagcagtatccaaactttttggcttcgtctggatattgttactgcaagtgttggtgctgcattcctggatgccgtttacagagtgatttcttaaacattggttgtgtcacagtgcagctgaccagtttaaagccttttgctattttgctcacaatcaaagaaaccagaaacatctaattaacgtttacctcatttagagttagaatcacctgattattttactacatttggaataagcataagagatgcttttaatacgacaaattttaaaactatctggattaaaacacctttttattcacttttttattaagataaaactataaattaataattagtctcctattagtcttaagagattttt

SEQ ID NO: 252 - DNA, 853 bp, Homo sapien
gtaaattacagcatataggaattaccctcccactgccccttctttctggcaagcaatactgtttaaaacacatactcatgatcagaattgggctaaaacattttgtagagctttatttatttaatgagataccactaaagccttaatactgtaaggcaaatattgcagtgaatgccagtatttcagtatatagtagcatatccttgcctttcagtctgttaagattgactaacatttaattaccttgcctatgttaaaaaaggaaagaaattaccttatagggatatgcaagctcctgaggtttctcagctgtgagcccagccaagttgccctcctccaactggctacttccctcctcaacacacagaaccttatacacaacagtaaataaccctcaataaatttgaatcttatctcaatctaaagacaccaccatcattatgggggaatgttgttagtcctcaaaacctcagtcagtttagaacaacacagcagtatccaaactttttggcttcgtctggatattgttactgcaagtgttggtgctgcattcctggatgccgtttacagagtgatttcttaaacattggttgtgtcacagtgcagctgaccagtttaaagccttttgctattttgctcacaatcaaagaaaccagaaacatctaattaacgtttacctcatttagagttagaatcacctgattattttactacatttggaataagcataagagatgcttttaatacgacaaattttaaaactatctggattaaaacacctttttattcacttttttattaagataaaactataaattaataattagtctcctattagtcttaagagattttt

SEQ ID NO: 253 - DNA, 614 bp, Homo sapien
agatcctgatattatctgtgtttctgatgtatacacacggaggtatcaccattttcacagtagttataccttttacatctttggatcatttggttatctttaatgttgaatatgcaactctgtttcaagtggacactatattctcattttaataaacagaatggtgtctgtttctgctccacaagaagacaaaaatgtttaagcatatattatgtgtaaactactgtacagaacttaaagttgaagatgagatctcagtttcaaaactatcctaaatggaattttaagcactgtagaattcaaccagaacaatttttaacgtataaatatctataataacaatgatagcaactcccatttatgaagtattaggtgccaggcacagtgctaggtgcttggtatagtcttggtattatctataattttgtaagcctcatttcccttttagttttttaaagtcataaagccacattggttaaatttcttgatcttgtgtaatactcttaaaaaaagataaaaaaccctcataaaatatacagcatagctacaaaattctattaaaacaactttataagtaatttgaataatacatttgatatatattaaaaatattt

SEQ ID NO: 254 - DNA, 614 bp, Homo sapien; identical to SEQ ID NO: 253

SEQ ID NO: 255 - DNA, 232 bp, Homo sapien
agtaaaaccatcaagaaaatcaaggatgattaacagacagtttgaaatagtgtttcctggagacaggaatgagaggggatttgataagggaggaggagttctggggcacttctgaagtcctggcgatgttatttttcttaagctgagagtgggcatgtggatgttaattttataattgtttaatcctatatgttatatgtactcttttgttatacatttcatggcaaaaaaa

SEQ ID NO: 256 - DNA, 232 bp, Homo sapien; identical to SEQ ID NO: 255

SEQ ID NO: 257 - DNA, 98 bp, Homo sapien
aaaagccaacatttgctacaagccatgtgctgttctgggccttcaggggttaaccccaggtcagcattgccattctgtagaaaagaaagtaggaccca

SEQ ID NO: 258 - DNA, 98 bp, Homo sapien
aagagccaacatttgctacaagccatgtgctgttctgggccttcaggtgttaaccccaggtcagcattgccattctgtagaaaagaaagtgggaccca

SEQ ID NO: 259 - DNA, 1155 bp, Homo sapien
cactcagccaacacctatccttgaggaatagaaagatccaggctccacaccacacaccatcactgactcaagtggctgttctgattcccagctgagcctgaggggttcggggaggtaatctctgaggtcctcactgctgggccgtgcctgggcatggcctcttcctgcaattttccaactaaactctccgggggggctcagcgccatggggtggttcgaagaaccatgatgaaggctggttcgaattgtgatgaccatttttgtccacatctcctaggacccataagccagagtttctctggagcttatagctagaaggggttctgggtcctggagtgcaggcctgtcaactttacaggagagcactagattgctttctgaagtggctgaaccaggttatgcttccatcagctgtgtatgagcatccccatcttcttgaccacacttgaagccatcagtttccttgaagcatatgggttgcacacttcattttgcatgtatcaaatttatataataaaaaatgtaaggaagccatggaaataaaaacgtaggtgtgccttctgtaggctgctacgctcctgtgcacgagggcgtctagaactttgccctccatgcacaagttgcagagcaccctcatcaggacatttacgaaggccctggggtgggatgggcactgcctatgtggccctcccccagcccagcagtatgcagtggcccgggtccaatcaaaggtcgcctgggagggtgagttgcaagaatctggggaaaagagcccaaggtggctgccgcctgctaacagcttgtctagacaggccccatggggcttcaccgcacattgcgagagctctggccagccccctgcccacttgcaaaagaggctgttggcagcaacacttcaccactagaaacctttactccaattcgaaacatgccttaacgcacagtgtgaattacccactctcgtggcccacagaggttgactcattcaggcccccttttgttcagatgaggaaactgaggctgactccgaagcctgggggctttcagatgtggagtgggtccctgtgcccaggtgatgaggggaccaggcgggtctggagcagggctggagtggggctcagatgtagtaggctggcagttaaaggtgccagatgt

SEQ ID NO: 260 - DNA, 1207 bp, Homo sapien
agggcgcttaggcttgtagcttggccgggggttcttgcagaagagccactggcactcagccaacacctatccttgaggaatagaaagatccaggctccacaccacacaccatcactgactcaagtggctgttctgattcccagctgagcctgaggggttcggggaggtaatctctgaggtcctcactgctgggccgtgcctgggcatggcctcttcctgcaattttccaactaaactctccgggggggctcagcgccatggggtggttcgaagaaccatgatgaaggctggttcgaattgtgatgaccatttttgtccacatctcctaggacccataagccagagtttctctggagcttatagctagaaggggttctgggtcctggagtgcaggcctgtcaactttacaggagagcactagattgctttctgaagtggctgaaccaggttatgcttccatcagctgtgtatgagcatccccatcttcttgaccacacttgaagccatcagtttccttgaagcatatgggttgcacacttcattttgcatgtatcaaatttatataataaaaaatgtaaggaagccatggaaataaaaacgtaggtgtgccttctgtaggctgctacgctcctgtgcacgagggcgtctagaactttgccctccatgcacaagttgcagagcaccctcatcaggacatttacgaaggccctggggtgggatgggcactgcctatgtggccctcccccagcccagcagtatgcagtggcccgggtccaatcaaaggtcgcctgggagggtgagttgcaagaatctggggaaaagagcccaaggtggctgccgcctgctaacagcttgtctagacaggccccatggggcttcaccgcacattgcgagagctctggccagccccctgcccacttgcaaaagaggctgttggcagcaacacttcaccactagaaacctttactccaattcgaaacatgccttaacgcacagtgtgaattacccactctcgtggcccacagaggttgactcattcaggcccccttttgttcagatgaggaaactgaggctgactccgaagcctgggggctttcagatgtggagtgggtccctgtgcccaggtgatgaggggaccaggcgggtctggagcagggctggagtggggctcagatgtagtaggctggcagttaaaggtgccagatgt

SEQ ID NO: 261 - DNA, 1393 bp, Homo sapien
gcatgggccactgcactcagccaacacctatccttgaggaatagaaagatccaggctccacaccacacaccatcactgactcaagtggctgttctgattcccagctgagcctgaggggttcggggaggtaatctctgaggtcctcactgctgggccgtgcctgggcatggcctcttcctgcaattttccaactaaactctccgggggggctcagcgccatggggtggttcgaagaaccatgatgaaggctggttcgaattgtgatgaccatttttgtccacatctcctaggacccataagccagagtttctctggagcttatagctagaaggggttctgggtcctggagtgcaggcctgtcaactttacaggagagcactagattgctttctgaagtggctgaaccaggttatgcttccatcagctgtgtatgagcatccccatcttcttgaccacacttgaagccatcagtttccttgaagcatatgggttgcacacttcattttgcatgtatcaaatttatataataaaaaatgtaaggaagccatggaaataaaaacgtaggtgtgccttctgtaggctgctacgctcctgtgcacgagggcgtctagaactttgccctccatgcacaagttgcagagcaccctcatcaggacatttacgaaggccctggggtgggatgggcactgcctatgtggccctcccccagcccagcagtatgcagtggcccgggtccaatcaaaggtcgcctgggagggtgagttgcaagaatctggggaaaagagcccaaggtggctgccgcctgctaacagcttgtctagacaggccccatggggcttcaccgcacattgcgagagctctggccagccccctgcccacttgcaaaagaggctgttggcagcaacacttcaccactagaaacctttactccaattcgaaacatgccttaacgcacagtgtgaattacccactctcgtggcccacagaggttgactcattcaggcccccttttgttcagatgaggaaactgaggctgactccgaagcctgggggctttcagatgtggagtgggtccctgtgcccaggtgatgaggggaccaggcgggtctggagcagggctggagtggggctcagatgtagtaggctggcagttaaaggtgccagatgtgagccaggctgctgggtttgaatcctggagctgcctcatagcagcagtaggactttgggtaacttacataggtgctgtatgcctcagtgacctcatctgtaatatagagatgataagagtacctgtctcattggtctactgagttgtccggattaactcattaaatgagttaaaactcatgaagcccttggaactgtgactgacacatagtaagtactcaataaa

SEQ ID NO: 262 - DNA, 767 bp, Homo sapien
gcatgggccactgcactcagccaacacctatccttgaggaatagaaagatccaggctccacaccacacaccatcactgactcaagtggctgttctgattcccagctgagcctgaggggttcggggaggtaatctctgaggtcctcactgctgggccgtgcctgggcatggcctcttcctgcaattttccaactaaactctccgggggggctcagcgccatggggtggttcgaagaaccatgatgaaggctggttcgaattgtgatgaccatttttgtccacatctcctaggacccataagccagagtttctctggagcttatagctagaaggggttctgggtcctggagtgcaggcctgtcaactttacaggagagcactagattgctttctgaagtggctgaaccaggttatgcttccatcagctgtgtatgagcatccccatcttcttgaccacacttgaagccatcagtttccttgaagcatatgggttgcacacttcattttgcatgtatcaaatttatataataaaaaatgtaaggaagccatggaaataaaaacgtaggtgtgccttctgtaggctgctacgctcctgtgcacgagggcgtctagaactttgccctccatgcacaagttgcagagcaccctcatcaggacatttacgaaggccctggggtgggatgggcactgcctatgtggccctcccccagcccagcagtatgcagtggcccggggagggccacataggcagtctagttctagatcgcg

SEQ ID NO: 263 - DNA, 164 bp, Homo sapien
ggggtagaagccaggctgagaaggaatctgattccttatattggttatatttttttctgaaataaatgttagcttttattttccctccaagctgcaagagccattgaactctgacttctgtgcttctcacatttaaagcctcctgatttgagtacttagtacct

SEQ ID NO: 264 - DNA, 657 bp, Homo sapien
tgagacaggtctcagttaatttagaaggtttattttgccaaggttgaggaccctgtgacacagcctcaggaggtcctgatgatatgtgcccaaggtggtccaagcacaggttggttttatacattttagggagacatgagacatcagtatatgtaagatgttccttggttctgttgggaacggcaggacaacttgaagcagggagggggcttcgaggtcccaggtaggtgagagacaaacacttggattcttttgagtttctgattagcctttccaaaggaggcaatcagatacgcatttatctcagtgagcggagggatggctttgaacagaatgagaggcaggtttgccctaagcagttcccagcttgacttttccctttagcttagtgatttctggggccccaagatttattttcctttcacaggggccatgttatgtagaagccaggctgagaaggaatctgattccttatattggttatatttttttctgaaataaatgttagcttttattttccctccaagctgcaagagccattgaactctgacttctgtgcttctcacatttaaagcctcctgatttgagtacttagtacctgccaagacattagcaggtaggagttactattcccacctgacagtcaaggaaaggcca

SEQ ID NO: 265 - DNA, 994 bp, Homo sapien
cgatgcagagaagctgaggcccagctgacaggagggtcgagctgagcagtctcactgttcccccgagacctggaccaagctcagagccaggaagtggggattaacacaatgtggtgtccgaactaatgagttagcaaaacagaggcagatggcaattgagtaacttaactcgcccatctctgtttgcaatgcacttccacaagcttctcctctgtcgtcgtgctgtgtaactctgtccagccctttccgttcatcccagaaggtcatggccacagagtaatcatcctacataaaaggagctataacaccactttctaaacacaactgtcacccacaattggagtatactggtggggaggtgacagctttggtgagatacctctggttctggagggaaagcagttattttaaatgaattcttgttattttacatttaagatataattccatataacgattgcttaaaatgtagacagctgggtatggaaacgctaaaaaggggcataacttgcaactcggaaatgaaaacaagtaaaaaaggaaccttaattctgatcccaagacaactttccttcagtcagatcttcaggattgtgcaacagtttccttcacaggcagtggagagaggcgctgctaccagaggatgtgataaatgacgtgagtgtacacttaggccagacatgccagccttgccactctgggaggcaaacgaccgcttcacaaattatctactgccctgtgcctctcataaggttttttcctggcttcttttccaatggtcattgcttccaggtggcatattactgtgccagctagcaaccaaggccagccaggacatagccattgtgggaaatcctgccttgtacttttgagtgttggttcatttttataataatctgtgtaataataaagttccaaccacgtaaacaacaagattttccggaagaaaataaggttaaaaaaaatccctgatttatgcactttgttaaaatgt

SEQ ID NO: 266 - DNA, 1746 bp, Homo sapien
tcaaagcctgaagaaagggggggatgccgacagatcttgctgtttcccattgatgcctgaatgttctggtgcggggagccgaggccagtgcaggggacggacctctgttcccagcagctcactggggcactggcgctgaggctcacataacacagcctcagtatgagaatagaggacaagcacactttgacatcccaattgaaactccgggctgaatccgacatagaagaatgtaattacctttcctagtttgacggtgcactgaagaaaatgtcctatgtcagcttgtaaagctgttctgctgacagggcaggattttctcggcgtgggctgtgttgtaatcaacaggtctgcagaactggggcaccaggcgtaagggtcatcactggatgctcgtaatgctagattaggtccagaagtaagactgcccttctcgtatagttcattggttcttagctgccatatgggctcttcttctgagaggcacagaaaatgtgagagcatttggctggtggtactcagtgccatcaaacttccaagatggtcagcctgaaattgcagttgccttgaaggagtgccggaagggaagagagtgctagggggtgtaaggcgaaaatctatcccactgcctagaaaagtcttttggaagaatgagcgaagtccaaaggcttcaatttctgttgccaggggctggggagaaaacttcaccttgatgtgatgtggcagcgagggtggcaggcctggcatgctgtcgatgcagagaagctgaggcccagctgacaggagggtcgagctgagcagtctcactgttcccccgagacctggaccaagctcagagccaggaagtggggattaacacaatgtggtgtccgaactaatgagttagcaaaacagaggcagatggcaattgagtaacttaactcgcccatctctgtttgcaatgcacttccacaagcttctcctctgtcgtcgtgctgtgtaactctgtccagccctttccgttcatcccagaaggtcatggccacagagtaatcatcctacataaaaggagctataacaccactttctaaacacaactgtcacccacaattggagtatactggtggggaggtgacagctttggtgagatacctctggttctggagggaaagcagttattttaaatgaattcttgttattttacatttaagatataattccatataacgattgcttaaaatgtagacagctgggtatggaaacgctaaaaaggggcataacttgcaactcggaaatgaaaacaagtaaaaaaggaaccttaattctgatcccaagacaactttccttcagtcagatcttcaggattgtgcaacagtttccttcacaggcagtggagagaggcgctgctaccagaggatgtgataaatgacgtgagtgtacacttaggccagacatgccagccttgccactctgggaggcaaacgaccgcttcacaaattatctactgccctgtgcctctcataaggttttttcctggcttcttttccaatggtcattgcttccaggtggcatattactgtgccagctagcaaccaaggccagccaggacatagccattgtgggaaatcctgccttgtacttttgagtgttggttcatttttataataatctgtgtaataataaagttccaaccacgtaaacaacaagattttccggaagaaaataaggttaaaaaaaatccctgatttatgcactttgttaaaatgt

SEQ ID NO: 267 - DNA, 993 bp, Homo sapien
cgatgcagagaagctgaggcccagctgacaggagggtcgagctgagcagtctcactgttcccccgagacctggaccaagctcagagccagggaagtggggattaacacaatgtggtgtccgaactaatgagttagcaaaacagaggcagatggcaattgagtaacttaactcgcccatctctgtttgcaatgcacttccacaagcttctcctctgtcgtcgtgctgtgtaactctgtccagccctttccgttcatcccagaaggtcatggccacagagtaatcatcctacataaaaggagctataacaccactttctaaacacaactgtcacccacaattggagtatactggtggggaggtgacagctttggtgagatacctctggttctggagggaaagcagttattttaaatgaattcttgttattttacatttaagatataattccatataacgattgcttaaaatgtagacagctgggtatggaaacgctaaaaaggggcataacttgcaactcggaaatgaaaacatagaaaaaggaaccttaattctgatcccaagacaactttccttcagtcagatcttcaggattgtgcaacagtttccttcacaggcagtggagagaggcgctgctaccagaggatgtgataaatgacgtgagtgtacacttaggccagacatgccagccttgccactctgggaggcaaacgaccgcttcacaaattatctactgccctgtgcctctcataaggttttttcctggcttcttttccaatggtcattgcttccaggtggcatattactgtgccagctagcaacaaggccagccaggacatagccattgtgggaaatcctgccttgtacttttgagtgttggttcatttttataataatctgtgtaataataaagttccaaccacgtaaacaacaagattttccggaagaaaataaggttaaaaaaaatccctgatttatgcactttgttaaaatgt

SEQ ID NO: 268 - DNA, 211 bp, Homo sapien
gaaaagttgactgcaaatgtgtatgggaatggaggcaattttgtggagaatactaccaagattgtgtaggaagcctgaggacaaacttctaagctaattgaatgatagactatcataagactaaattctgggaacatattcttaatttggtacctcataagccctccctcattttttgagaagaaaaaatttctgactcattcatgtcata

SEQ ID NO: 269 - DNA, 1729 bp, Homo sapien
atcactcctaagctcaccacccaggccaatgtactccagaaaaagggagaaggcttcaccacctccctgtgtgatttcatgtcccaagctctgtgtctcagggtgtaggaagccctctgttgaataagtccaccctccctggccacagccttagtcctacttgctgtttgggaacagaagatccctgcccggtgcctacagaggggtgggcagaggctgaaaccctcctccatcttccctcccaggccccaggagccgaagattcctcttctcaccacatgaagctcccctcccctcctccagtcctcagctttcctttctaagagagaagagaccggggcctgggcagtgagtggacaggactgtccccctgtcctcctctgtaggtgcacgcccctacaggtgacacctctgggtcctccacaccctcagtaggagctccagggcatggctggtctcccagccacacgggaagccacaggatccccatgggacatccccagccacgtgccacactcagtaaccacccgtgggcttgtgtgcaaatccctgaagtcagtgatggctcaaatgtcgtctctgccaccgtggaggttggccatgggggaaaggtgacgggggcagaagggtgagggctccaagtggctcgaggaaggggccatggtgtgagcaggggcacgggcgggcagtcaaggagctgggaagggccagccagtcctgccctggagcctccgggaggagccagcgctgcggacaccttggctgtagccagggaagctcactttggacttccaacctccacacctgtcagaggccacgagtgtttagccattaaagaaacctccaggggctgcggtgacaaatgaccacagactcaggagctgaacacaacgcacatgcattgtctcacaattctggagtcaaaagtctagaaacagtcggtggggctggttccttctggagacttctgggaaggggagaagccgctttcttggctttcccagtttctggagtggctgcatcctgcactctcggccccgctatgccaccaaggcctccgtttctgtagcctctgctgctctctggcatctgcacggttgccccgaagccgctccgcgacggccctccctgagctgtgtagtgctggggggaggaggcgtggccacagtgggctgcattcaggatcttgaaagccactgaagccatggctggctctcagccctcagggagcctcttcccctgcctggcaccaggctcccagaatctgggaggcagcctcttcatctggctgctggtggagacctgagcccagccccagggtcctcagtcctgccccttgtcctccgcaagctctcactacatcctacctatgtccagggacctcggcccatgcatctgcccagatcccagcctacccgagagcatgcatccccaactggaccagcacccaacatagccgagggctcccctgacccacataaaccttgttaatattgcctctgtggtctctgcttgttgcctgaggggtggaggtggggggtatctgctcagactggctccagcgcatcctaaggccaggcccttcccaaaggagagtgaagccaggccccatgagtcccagctggacaggaaggtacaggcgggacggccctgggttaggcagagtggtcaggatggttgctccagatacataggaacctccagccaggcgctggcgcatggcagttgg

SEQ ID NO: 270 - DNA, 1496 bp, Homo sapien
atcactcctaagctcaccacccaggccaatgtactccagaaaaagggagaaggcttcaccacctccctgtgtgatttcatgtcccaagctctgtgtctcagggtgtaggaagccctctgttgaataagtccaccctccctggccacagccttagtcctacttgctgtttgggaacagaagatccctgcccggtgcctacagaggggtgggcagaggctgaaaccctcctccatcttccctcccaggccccaggagccgaagattcctcttctcaccacatgaagctcccctcccctcctccagtcctcagctttcctttctaagagagaagagaccggggcctgggcagtgagtggacaggactgtccccctgtcctcctctgtaggtgcacgcccctacaggtgacacctctgggtcctccacaccctcagtaggagctccagggcatggctggtctcccagccacacgggaagccacaggatccccatgggacatccccagccacgtgccacactcagtaaccacccgtgggcttgtgtgcaaatccctgaagtcagtgatggctcaaatgtcgtctctgccaccgtggaggttggccatgggggaaaggtgacgggggcagaagggtgagggctccaagtggctcgaggaaggggccatggtgtgagcaggggcacgggcgggcagtcaaggagctgggaagggccagccagtcctgccctggagcctccgggaggagccagcgctgcggacaccttggctgtagccagggaggctcactttggacttccaacctccacacctgtcagaggccacgagtgtttagccattaaagaaacctccaggggctgcggtgacaaatgaccacagactcaggagctgaacacaacgcacatgcattgtctcacaattctggagtcaaaagtctagaaacagtcggtggggctggttccttctggagacttctgggaaggggagaagccgctttcttggctttcccagtttctggagtggctgcatcctgcactctcggccccgctatgccaccaaggcctccgtttctgtagcctctgctgctctctggcatctgcacggttgccccgaagccgctccgcgacggccctccctgagctgtgtagtgctggggggaggaggcgtggccacagtgggctgcattcaggatcttgaaagccactgaagccatggctggctctcagccctcagggagcctcttcccctgcctggcaccaggctcccagaatctgggaggcagcctcttcatctggctgctggtggagacctgagcccagccccagggtcctcagtcctgccccttgtcctccgcaagctctcactacatcctacctatgtccagggacctcggcccatgcatctgcccagatcccagcctacccgagagcatgcatccccaactggaccagcacccaacatagccgagggctcccctgacccacataaaccttgttaatattg

SEQ ID NO: 271 - DNA, 1077 bp, Homo sapien
gggagaaggcttcaccacctccctgtgtgatttcatgtcccaagctctgtgtctcagggtgtaggaagccctctgttgaataagtccaccctccctggccacagccttagtcctacttgctgtttgggaacagaagatccctgcccggtgcctacagaggggtgggcagaggctgaaaccctcctccatcttccctcccaggccccaggagccgaagattcctcttctcacgacatgaagctcccctcccctcctccagtcctcagctttcctttctaagagagaagagaccggggcctgggcagtgagtggacaggactgtccccctgtcctcctctgtaggtgcacgcccctacaggtgacacctctgggtcctccacaccctcagtaggagctccagggcatggctggtctcccagccacacgggaagccacaggatccccatgggacatccccagccacgtgccacactcagtaaccacccgtgggcttgtgtgcaaatccctgaagtcagtgatggctcaaatgtcgtctctgccaccgtggaggttggccatgggggaaaggtgacgggggcagaagggtgagggctccaagtggctcgaggaaggggccatggtgtgagcaggggcacgggcgggcagtcaaggagctgggaagggccagccagtcctgccctggagcctccgggaggagccagcgctgcggacaccttggctgtagccagggaggctcactttggacttccaacctccacacctgtcagaggccacgagtgtttagccattaaagaaacctccaggggctgcggtgacaaatgaccacagactcaggagctgaacacaacgcacatgcattgtctcacaattctggagtcaaaagtctagaaacagtcggtggggctggttccttctggagacttctgggaaggggagaagccgctttcttggctttcccagtttctggagtggctgcatcctgcactctcggccccgccatgccaccaaggcctccgtttctgtagcctctgctgctctctggcatctgcacggttgccccgaagccgctccgcgacg

SEQ ID NO: 272 - DNA, 800 bp, Homo sapien
cctgccttaatgagtttttacaatctacgatatagactttgtcttatcaacagtggtactttcaagaatacagatttactaacataaaggcaagtaacagcaaagaagacagagtctgggaaattcaggtattagggctttcccattctttcctctaactcatctaaggtcccaccctcaatcattctgcttataaggactgtgactgtttctccaaagaatagtgcagattgcaaagggtcattgtcccaacaaagcagtcaactgaactctcagcactaaagttaatcagatgcctcagagtcaaggaatcttccacaatcttttaaaggaattaaattcttaattttgtgagaaaacagcgaaagcacacaatggcgactcgtcttttttgatcttgcatttgatttctggagtggcaggttaattcacttaaaaaaaaaaaaagagccatctctcccacttaaaacagcttaactagttgaagcctcaaggacttaactattcctgcagcccttgctttgttcagccctgcttcccattaaacactggatgcaggcagagacagctttgtaagactctgtctttataaagaagggagacatttatctgggttctcactggcttcaggaaggtcacctctttgtaaaggttctctggtctactgctaactgggtgccaggtgttttggaaaatcaagatgtggttggcagtacaatgatgagaaagcaataaggatccccaattccaccactcggagaagctagtcagactaaaatctccaaaggttgccatttatg

SEQ ID NO: 273 - DNA, 981 bp, Homo sapien
aacataatacacattagtaatattctcctgggaagagcgagccaaagggatagttattcatggtaggtgccacatgggacatctcagttactagttagccaggtgagcaattaatatttgagtacctactgtatgctgggtacaaagctaggcacactggatacaaaggtgaacaagaatccctgccttaatgagtttttacaatctacgatatagactttgtcttatcaacagtggtactttcaagaatacagatttactaacataaaggcaagtaacagcaaagaagacagagtctgggaaattcaggtattagggctttcccattctttcctctaactcatctaaggtcccaccctcaatcattctgcttataaggactgtgactgtttctccaaagaatagtgcagattgcaaagggtcattgtcccaacaaagcagtcaactgaactctcagcactaaagttaatcagatgcctcagagtcaaggaatcttccacaatcttttaaaggaattaaattcttaattttgtgagaaaacagcgaaagcacacaatggcgactcgtcttttttgatcttgcatttgatttctggagtggcaggttaattcacttaaaaaaaaaaaaagagccatctctcccacttaaaacagcttaactagttgaagcctcaaggacttaactattcctgcagcccttgctttgttcagccctgcttcccattaaacactggatgcaggcagagacagctttgtaagactctgtctttataaagaagggagacatttatctgggttctcactggcttcaggaaggtcacctctttgtaaaggttctctggtctactgctaactgggtgccaggtgttttggaaaatcaagatgtggttggcagtacaatgatgagaaagcaataaggatccccaattccaccactcggagaagctagtcagactaaaatctccaaaggttgccatttatg

SEQ ID NO: 274 - DNA, 856 bp, Homo sapien
gtacctactgtatgctgggtacaaagctaggcacactggatacaaaggtgaacaagaatccctgccttaatgagtttttacaatctacgatatagactttgtcttatcaacagtggtactttcaagaatacagatttactaacataaaggcaagtaacagcaaagaagacagagtctgggaaattcaggtattagggctttcccattctttcctctaactcatctaaggtcccaccctcaatcattctgcttataaggactgtgactgtttctccaaagaatagtgcagattgcaaagggtcattgtcccaacaaagcagtcaactgaactctcagcactaaagttaatcagatgcctcagagtcaaggaatcttccacaatcttttaaaggaattaaattcttaattttgtgagaaaacagcgaaagcacacaatggcgactcgtcttttttgatcttgcatttgatttctggagtggcaggttaattcacttaaaaaaaaaaaaagagccatctctcccacttaagacagcttaactagttgaagcctcaaggacttaactattcctgcagcccttgctttgttcagccctgcatcccattaaacactggatgcaggcagagacagctttgtaagactctgtctttataaagaagggagacatttatctgggttctcactggcttcaggaaggtcacctctttgtaaaggttctctggtctactgctaactgggtgccaggtgtttggaaaatcaagatgtggttggcagtaaatgatgagaaagcaataaggatcccaattccaccactcggagagctagtcagactaaaatctccaaaggttgccatttatg

SEQ ID NO: 275 - DNA, 497 bp, Homo sapien
catgttaagcgtgggcagcatagataagtaaaagctgcctgcaatctccaaccctcctttgtaaagggcttgtgctctggaggctgttagccatggttttccttataaaccgagagactggtcagtatctctgaacctcagcctccacatctgtaaaacgggcattttactcacttttctgggtaattgtaaaccataaaaggataaaacagtgtacactgcacagttcagattctctcatgtaacaggtacagagcaaattatagttccctttcttccccagatagattcctacagcgaattttacttctttacaaaatcttccagagacaggtcaaatactgttgcaataactgttaacaaccaaaatatcaatttcaagatgtccaagctttaattgacagagttatttaatcagttggatggaaaaaaatcttaaatgatataaaataatttggacgggtctttcaagtttattgtatagaaattgaactatt

SEQ ID NO: 276 - DNA, 497 bp, Homo sapien; identical to SEQ ID NO: 275

SEQ ID NO: 277 - DNA, 1276 bp, Homo sapien
ggagaagatttatttttaacacacttggcccaggagaaggaaaggatatatttgctaaagaattctttctgcccttttccgttttaaatttctgccaggcatgaggaaactgtgcttttttgttaggcctcggaagcatgtgtttacaataaatgtgtaacatttttagaatagttagcaagcactgaagcgaagaaaaaaatctgacttgcctaaccaccaccaccttgaatgttctacaagaaacattactgtccctttaaaagacaaaggttaagtggaaagctatttgttaattgggtaatgtgtgtgttttggggacaataaggtttttaaaaaaggcagggggaacattcttataatctttaaataagaggaagtttcttcagctatcctacttgttttgcaaggagcagtagaactactcatttaaataagggcaatgccacgtagattcttctagacccactgtttttactttcaaggagaagtgcaggacactagcccagaacttctgacgtcatcccccaactatttctgctgtgtgttcctttattcgagcttgtggagaggaatatttctttatgtcctggccaggaacattctaactccccactggcaggacttaagttatgtctttatattttcgcctgtcttttgtaaattgtaaacctgtcccctcataaatagggcatcttcttgtacctgccacatgtcgggccggtcagcacaggttttctgcagggcttctggctgggctggcaaaaagcagcagggagcagggcaaagctttttttctggcctgactcccccttgctgcagcccagcgctgccacctgggtggatggtccccggggccctattcccagttgctccagagccactatttaggatccaggttgtgccaccaagttcaaggctggttgtgatggtgagaacagctgctttcatagaaaaatcatcatgtcctagcacagatggccccaagcaggggaagtacaatactgcaggctgcaaatccatgtcacaggtggcaaccttggtcacagagatcgggggaagggtaatgtttacaaaggaaccttttaaaaaagattttgactggagcacattggagttctcgggagttcccaaagctaatttgtgtctcctctctgactactcacgtagttttgagcaagtgcctaccttgatttttctgtcttttaatagaattgaatcatacttgctacactttccctcatcatttagcattttgagaccttgaccttttacc

SEQ ID NO: 278 - DNA, 1770 bp, Homo sapien
aagaattcggcacgaggggatcctattatttgaaaacagacttgcaattaaggattaaaaaaaaattcatggtaaataatcatcggttgaatgtttggccaaacgtatgtgtctatttattaaaaattagggacctacctagctctacaatgctacagctttaattgagtttcaaaagcacattttaaacaacctagcaagaggtagctttctggcaagttttcgatactgtagttcaatgtttacatttcttttcctggcatgtctgagcctttgtttccagcttaaaagtggaaccattatattcaaaagtaaagctgggttaataatgcttactgcaattatctgatctttatgcatttttaatgagaacacacagccagcagaataatttaatgagggcaggctagcttttaaagctgtgttttcactatgccgaaccatatcaactttctcgctgagaagcagcagtgagaaatgatggagaagatttatttttaacacacttggcccaggagaaggaaaggatatatttgctaaagaattctttctgcccttttccgttttaaatttctgccaggcatgaggaaactgtgcttttttgttaggcctcggaagcatgtgtttacaataaatgtgtaacatttttagaatagttagcaagcactgaagcgaagaaaaaaatctgacttgcctaaccaccaccaccttgaatgttctacaagaaacattactgtccctttaaaagacaaaggttaagtggaaagctatttgttaattgggtaatgtgtgtgttttggggacaataaggtttttaaaaaaggcagggggaacattcttataatctttaaataagaggaagtttcttcagctatcctacttgttttgcaaggagcagtagaactactcatttaaataagggcaatgccacgtagattcttctagacccactgtttttactttcaaggagaagtgcaggacactagcccagaacttctgacgtcatcccccaactatttctgctgtgtgttcctttattcgagcttgtggagaggaatatttctttatgtcctggccaggaacattctaactccccactggcaggacttaagttatgtctttatattttcgcctgtcttttgtaaattgtaaacctgtcccctcataaatagggcatcttcttgtacctgccacatgtcgggccggtcagcacaggttttctgcagggcttctggctgggctggcaaaaagcagcagggagcagggcaaagctttttttctggcctgactcccccttgctgcagcccagcgctgccacctgggtggatggtccccggggccctattcccagttgctccagagccactatttaggatccaggttgtgccaccaagttcaaggctggttgtgatggtgagaacagctgctttcatagaaaaatcatcatgtcctagcacagatggccccaagcaggggaagtacaatactgcaggctgcaaatccatgtcacaggtggcaaccttggtcacagagatcgggggaagggtaatgtttacaaaggaaccttttaaaaaagattttgactggagcacattggagttctcgggagttcccaaagctaatttgtgtctcctctctgactactcacgtagttttgagcaagtgcctaccttgatttttctgtcttttaatagaattgaatcatacttgctacactttccctcatcatttagcattttgagaccttgaccttttaccaaaaaaaaaaaa

SEQ ID NO: 279 - DNA, 4753 bp, Homo sapien
ggatttgtcggaaggaagggctgcagcttacagcaacagagtttagactgtctttgcttcatcatctgaaggtaaaattttccagatacggcagacggctttcagagtacaataaacagggaatgagaactatttacatggaagtttctttctcatgatgcggtggagaagcctcggccacttggttctgccagatgttcctggggttactgtaaatgggaaggacaggcagagctaaacaaggtttatcatttaaaagtgcctgtgtgaagtcacttttgctggaaaactgcagcttgggagctttctttgtattcacatcccactcttctgtcaagtacactttaccctgaccttatgagtggatgaagatacctcagttgtctgactttgccaattgcttaatttcagaatttaaaaaggggaaagaaaaacatcctgctaaaatatgaacatctgagtgtcttattttccaacatcgtcaatagctgtgagcgtcagcattaaatattctcccaaggagtgccatgatattgaagtcactttattaataacagctgtatctgcaaaacagtcaagagactcggacgttgaaagccagagatgacactgagcatgcttttattgcggcctaccatctttaagtgggacatattgattgatgagtgattgcctgtccatacactctctcatcatcctgttccttggattggacttcactaagcaatttatcactcaccttcagacttacatgtgggagttttcacaacagtagttttggaatcattagaacttggattgatttcatcatttaacagaaacaaacagcccaaattactttatcaccatggctttgaacgttgccccagtcagagatacaaaatggctgacattagaagtctgcagacagtttcaaagaggaacatgctcacgctctgatgaagaatgcaaatttgctcatccccccaaaagttgtcaggttgaaaatggaagagtaattgcctgctttgattccctaaagggccgttgttcgagagagaactgcaagtatcttcaccctccgacacacttaaaaactcaactagaaattaatggaaggaacaatttgattcagcaaaaaactgcagcagcaatgcttgcccagcagatgcaatttatgtttccaggaacaccacttcatccagtgcccactttccctgtaggtcccgcgatagggacaaatacggctattagctttgctccttacctagcacctgtaacccctggagttgggttggtcccaacggaaattctgcccaccacgcctgttattgttcccggaagtccaccggtcactgtcccgggctcaactgcaactcagaaacttctcaggactgacaaactggaggtatgcagggagttccagcgaggaaactgtgcccggggagagaccgactgccgctttgcacaccccgcagacagcaccatgatcgacacaagtgacaacaccgtaaccgtttgtatggattacataaaggggcgttgcatgagggagaaatgcaaatattttcaccctcctgcacacttgcaggccaaaatcaaagctgcgcagcaccaagccaaccaagctgcggtggccgcccaggcagccgcggccgcggccacagtcatgactcagtcgactgccaaagcaatgaagcgacctctcgaagcaactgtagacctggcctttccccctggtgctcttcatcctttaccaaagagacaagcacttgaaaaaagcaatggtaccagcgcggtctttaaccccagcgtcttgcactaccagcaggctctcaccagcgcacagttgcagcaacacgccgcgttcattccaacagtacccatgatgcacagcgctacgtccgccactgtctctgcagcaacaactcctgcaacaagtgtccccttcgcagcaacagccacagccaatcagataattctgaaataatcagcagaaacggaatggaatgccaagaatctgcattgagaataactaaacattgttactgtacatactatcctgtttcctcctcaatagaattgccacaaactgcatgctaaataaagatgtagttcttctggacagaccacaactctaagaagctagtgctgctatctcatatatgagtattaaatatggtatgcttagtatattccaacctaagatagttaactacctgagaccagctgtgatgtttaaagacataaaggataaagtttacttttaaagggtttctaaacatagtttctgtcctaggaatattgtcttatctccataactatagctgatgcagaaagtccagccagtttactcatttcgattcagaatatttcaaatttagcaataaacaattagcattagttaaaaaagaaacatattccaagggcaggttcgattctagctctaattactgtcatgtcatttacccactggatcaaagggtatgtttcacttcttgacaatataaatgctgcagcaaagatgagaggtgaagtaaaaccgatacctgtcctgcaggtctaaaatttgaatggaaattcaagcacaagtactggggacacatcaaagtgtggtgtttggtttgcctggagatgccacgttgaatcatgtgattctagattaacattaaatagattgaaaaagaaactttgcacggtatgagcttcataccccaccaaacaaagtcttgaaggtattattttacaagtatatttttaaagttgttttataagagagactttgtagaagtgcctagattttgccagacttcatccagcttgacaagattgagaggcccatgccaacagtctaatctaagagattagtctttcaaactcaccatccagttgcctgttacagaataactcttcttaactaaaaacctagtcaaacaaggaagctgtaggtgaggagatctgtataatattctaatttaagtaagtttgagtttagtcactgcaaatttgactgtgactttaatctaaattactatgtaaacaaaaagtagatagtttcactttttaaaaaatccattactgttttgcatttcaaaagttggattaaagggttgtaactgactacagcatggaaaaaaatagttcttttaattctttcaccttaaagcatattttatgtctcaaaagtataaaaaactttaatacaagtacatacatattatatatacacatacatatatatactatatatggatgaaacatattttaatgttgtttacttttttaaatacttggttgatcttcaaggtaatagcgatacaattaaattttgttcagaaagtttgttttaaagtttattttaagcactatcgtaccaaatatttcatatttcacattttatatgttgcacatagcctatacagtacctacatagtttttaaattattgtttaaaaaacaaaacagctgttataaatgaatattatgtgtaattgtttcaaacatccattttctttgtgaacatattagtgattgaagtattttgacttttgagattgaatgtaaaatattttaaatttgggatcatcgcctgttctgaaaactagatgcaccaaccgtatcattatttgtttgaggaaaaaaagaaatctgcattttaattcatgttggtcaaagtcgaattactatctatttatcttatatcgtagatctgataaccctatctaaaagaaagtcacacgctaaatgtattcttacatagtgcttgtatcgttgcatttgttttaatttgtggaaaagtattgtatctaacttgtattactttggtagtttcatctttatgtattattgatatttgtaattttctcaactataacaatgtagttacgctacaacttgcctaaaacattcaaacttgttttcttttttctgtttttttctttgttaattcatttaaactcattgaaaacatagtatacattactaaaaggtaaattatgggaatcactgaaatatttttgtagattaattgttgtaacattgtctttcttttttttcttttgtttcatgattttgatttttaaaattattagcacacaactattttcagccctttaataatggagcatcaaaaacatcacctgtaaccccaagcaaatatagaagactgtattttttactatgatatccattttccagaattgtgattacaatatgcaaagagtcataaatatgccatttacaataaggaggaggcaaggcaaatgcatagatgtacaaatatatgtacaacagattttgctttttatttatttataatgtaattttatagaataattctgggatttgagaggatctaaaactatttttctgtataaatattatttgccaaaagtttgtttatattcagaagtctgactatgatgaataaatcttaaatgctttgtttaattaaaaaacaaaaatcaccaatatccaagacatgaagatatcagttcaacaaatactgtagttaagagactaactctccacttgtatgggaactacatttcactcttggttttcaggatataacagcacttcaccgaaatattctttcagccataccactggtaacatttctactaaatctttctgtaacacttaaagaattccctcattcattaccttacagtgtaaacaggagtctaatttgtatcaatactatgttttggttgtaatattcagttcactcacccaatgtacaaccaatgaaataaaagaagcatttaaaagga

SEQ ID NO: 280 - DNA, 4789 bp, Homo sapien
ggatttgtcggaaggaagggctgcagcttacagcaacagagtttagactgtctttgcttcatcatctgaaggtaaaattttccagatacggcagacggctttcagagtacaataaacagggaatgagaactatttacatggaagtttctttctcatgatgcggtggagaagcctcggccacttggttctgccagatgttcctggggttactgtaaatgggaaggacaggcagagctaaacaaggtttatcatttaaaagtgcctgtgtgaagtcacttttgctggaaaactgcagcttgggagctttctttgtattcacatcccactcttctgtcaagtacactttaccctgaccttatgagtggatgaagatacctcagttgtctgactttgccaattgcttaatttcagaatttaaaaaggggaaagaaaaacatcctgctaaaatatgaacatctgagtgtcttattttccaacatcgtcaatagctgtgagcgtcagcattaaatattctcccaaggagtgccatgatattgaagtcactttattaataacagctgtatctgcaaaacagtcaagagactcggacgttgaaagccagagatgacactgagcatgcttttattgcggcctaccatctttaagtgggacatattgattgatgagtgattgcctgtccatacactctctcatcatcctgttccttggattggacttcactaagcaatttatcactcaccttcagacttacatgtgggagttttcacaacagtagttttggaatcattagaacttggattgatttcatcatttaacagaaacaaacagcccaaattactttatcaccatggctttgaacgttgccccagtcagagatacaaaatggctgacattagaagtctgcagacagtttcaaagaggaacatgctcacgctctgatgaagaatgcaaatttgctcatccccccaaaagttgtcaggttgaaaatggaagagtaattgcctgctttgattccctaaagggccgttgttcgagagagaactgcaagtatcttcaccctccgacacacttaaaaactcaactagaaattaatggaaggaacaatttgattcagcaaaaaactgcagcagcaatgcttgcccagcagatgcaatttatgtttccaggaacaccacttcatccagtgcccactttccctgtaggtcccgcgatagggacaaatacggctattagctttgctccttacctagcacctgtaacccctggagttgggttggtcccaacggaaattctgcccaccacgcctgttattgttcccggaagtccaccggtcactgtcccgggctcaactgcaactcagaaacttctcaggactgacaaactggaggtatgcagggagttccagcgaggaaactgtgcccggggagagaccgactgccgctttgcacaccccgcagacagcaccatgatcgacacaagtgacaacaccgtaaccgtttgtatggattacataaaggggcgttgcatgagggagaaatgcaaatattttcaccctcctgcacacttgcaggccaaaatcaaagctgcgcagcaccaagccaaccaagctgcggtggccgcccaggcagccgcggccgcggccacagtcatgactcagtcgactgccaaagcaatgaagcgacctctcgaagcaactgtagacctggcctttccccctggtgctcttcatcctttaccaaagagacaagcacttgaaaaaagcaatggtaccagcgcggtctttaaccccagcgtcttgcactaccagcaggctctcaccagcgcacagttgcagcaacacgccgcgttcattccaacagggtcagttttgtgcatgacacccgctaccagtattgtacccatgatgcacagcgctacgtccgccactgtctctgcagcaacaactcctgcaacaagtgtccccttcgcagcaacagccacagccaatcagataattctgaaataatcagcagaaacggaatggaatgccaagaatctgcattgagaataactaaacattgttactgtacatactatcctgtttcctcctcaatagaattgccacaaactgcatgctaaataaagatgtagttcttctggacagaccacaactctaagaagctagtgctgctatctcatatatgagtattaaatatggtatgcttagtatattccaacctaagatagttaactacctgagaccagctgtgatgtttaaagacataaaggataaagtttacttttaaagggtttctaaacatagtttctgtcctaggaatattgtcttatctccataactatagctgatgcagaaagtccagccagtttactcatttcgattcagaatatttcaaatttagcaataaacaattagcattagttaaaaaagaaacatattccaagggcaggttcgattctagctctaattactgtcatgtcatttacccactggatcaaagggtatgtttcacttcttgacaatataaatgctgcagcaaagatgagaggtgaagtaaaaccgatacctgtcctgcaggtctaaaatttgaatggaaattcaagcacaagtactggggacacatcaaagtgtggtgtttggtttgcctggagatgccacgttgaatcatgtgattctagattaacattaaatagattgaaaaagaaactttgcacggtatgagcttcataccccaccaaacaaagtcttgaaggtattattttacaagtatatttttaaagttgttttataagagagactttgtagaagtgcctagattttgccagacttcatccagcttgacaagattgagaggcccatgccaacagtctaatctaagagattagtctttcaaactcaccatccagttgcctgttacagaataactcttcttaactaaaaacctagtcaaacaaggaagctgtaggtgaggagatctgtataatattctaatttaagtaagtttgagtttagtcactgcaaatttgactgtgactttaatctaaattactatgtaaacaaaaagtagatagtttcactttttaaaaaatccattactgttttgcatttcaaaagttggattaaagggttgtaactgactacagcatggaaaaaaatagttcttttaattctttcaccttaaagcatattttatgtctcaaaagtataaaaaactttaatacaagtacatacatattatatatacacatacatatatatactatatatggatgaaacatattttaatgttgtttacttttttaaatacttggttgatcttcaaggtaatagcgatacaattaaattttgttcagaaagtttgttttaaagtttattttaagcactatcgtaccaaatatttcatatttcacattttatatgttgcacatagcctatacagtacctacatagtttttaaattattgtttaaaaaacaaaacagctgttataaatgaatattatgtgtaattgtttcaaacatccattttctttgtgaacatattagtgattgaagtattttgacttttgagattgaatgtaaaatattttaaatttgggatcatcgcctgttctgaaaactagatgcaccaaccgtatcattatttgtttgaggaaaaaaagaaatctgcattttaattcatgttggtcaaagtcgaattactatctatttatcttatatcgtagatctgataaccctatctaaaagaaagtcacacgctaaatgtattcttacatagtgcttgtatcgttgcatttgttttaatttgtggaaaagtattgtatctaacttgtattactttggtagtttcatctttatgtattattgatatttgtaattttctcaactataacaatgtagttacgctacaacttgcctaaaacattcaaacttgttttcttttttctgtttttttctttgttaattcatttaaactcattgaaaacatagtatacattactaaaaggtaaattatgggaatcactgaaatatttttgtagattaattgttgtaacattgtctttcttttttttcttttgtttcatgattttgatttttaaaattattagcacacaactattttcagccctttaataatggagcatcaaaaacatcacctgtaaccccaagcaaatatagaagactgtattttttactatgatatccattttccagaattgtgattacaatatgcaaagagtcataaatatgccatttacaataaggaggaggcaaggcaaatgcatagatgtacaaatatatgtacaacagattttgctttttatttatttataatgtaattttatagaataattctgggatttgagaggatctaaaactatttttctgtataaatattatttgccaaaagtttgtttatattcagaagtctgactatgatgaataaatcttaaatgctttgtttaattaaaaaacaaaaatcaccaatatccaagacatgaagatatcagttcaacaaatactgtagttaagagactaactctccacttgtatgggaactacatttcactcttggttttcaggatataacagcacttcaccgaaatattctttcagccataccactggtaacatttctactaaatctttctgtaacacttaaagaattccctcattcattaccttacagtgtaaacaggagtctaatttgtatcaatactatgttttggttgtaatattcagttcactcacccaatgtacaaccaatgaaataaaagaagcatttaaaagga

SEQ ID NO: 281 - DNA, 3031 bp, Homo sapien
gtgctcgctgcctgttattaaaagactcagtcgactgccaaagcaatgaagcgacctctcgaagcaactgtagacctggcctttccccctggtgctcttcatcctttaccaaagagacaagcacttgaaaaaagcaatggtaccagcgcggtctttaaccccagcgtcttgcactaccagcaggctctcaccagcgcacagttgcagcaacacgccgcgttcattccaacagataattctgaaataatcagcagaaacggaatggaatgccaagaatctgcattgagaataactaaacattgttactgtacatactatcctgtttcctcctcaatagaattgccacaaactgcatgctaaataaagatgtagttcttctggacagaccacaactctaagaagctagtgctgctatctcatatatgagtattaaatatggtatgcttagtatattccaacctaagatagttaactacctgagaccagctgtgatgtttaaagacataaaggataaagtttacttttaaagggtttctaaacatagtttctgtcctaggaatattgtcttatctccataactatagctgatgcagaaagtccagccagtttactcatttcgattcagaatatttcaaatttagcaataaacaattagcattagttaaaaaagaaacatattccaagggcaggttcgattctagctctaattactgtcatgtcatttacccactggatcaaagggtatgtttcacttcttgacaatataaatgctgcagcaaagatgagaggtgaagtaaaaccgatacctgtcctgcaggtctaaaatttgaatggaaattcaagcacaagtactggggacacatcaaagtgtggtgtttggtttgcctggagatgccacgttgaatcatgtgattctagattaacattaaatagattgaaaaagaaactttgcacggtatgagcttcataccccaccaaacaaagtcttgaaggtattattttacaagtatatttttaaagttgttttataagagagactttgtagaagtgcctagattttgccagacttcatccagcttgacaagattgagaggcccatgccaacagtctaatctaagagattagtctttcaaactcaccatccagttgcctgttacagaataactcttcttaactaaaaacctagtcaaacaaggaagctgtaggtgaggagatctgtataatattctaatttaagtaagtttgagtttagtcactgcaaatttgactgtgactttaatctaaattactatgtaaacaaaaagtagatagtttcactttttaaaaaatccattactgttttgcatttcaaaagttggattaaagggttgtaactgactacagcatggaaaaaaatagttcttttaattctttcaccttaaagcatattttatgtctcaaaagtataaaaaactttaatacaagtacatacatattatatatacacatacatatatatactatatatggatgaaacatattttaatgttgtttacttttttaaatacttggttgatcttcaaggtaatagcgatacaattaaattttgttcagaaagtttgttttaaagtttattttaagcactatcgtaccaaatatttcatatttcacattttatatgttgcacatagcctatacagtacctacatagtttttaaattattgtttaaaaaacaaaacagctgttataaatgaatattatgtgtaattgtttcaaacatccattttctttgtgaacatattagtgattgaagtattttgacttttgagattgaatgtaaaatattttaaatttgggatcatcgcctgttctgaaaactagatgcaccaaccgtatcattatttgtttgaggaaaaaaagaaatctgcattttaattcatgttggtcaaagtcgaattactatctatttatcttatatcgtagatctgataaccctatctaaaagaaagtcacacgctaaatgtattcttacatagtgcttgtatcgttgcatttgttttaatttgtggaaaagtattgtatctaacttgtattactttggtagtttcatctttatgtattattgatatttgtaattttctcaactataacaatgtagttacgctacaacttgcctaaaacattcaaacttgttttcttttttctgtttttttctttgttaattcatttaaactcattgaaaacatagtatacattactaaaaggtaaattatgggaatcactgaaatatttttgtagattaattgttgtaacattgtctttcttttttttcttttgtttcatgattttgatttttaaaattattagcacacaactattttcagccctttaataatggagcatcaaaaacatcacctgtaaccccaagcaaatatagaagactgtattttttactatgatatccattttccagaattgtgattacaatatgcaaagagtcataaatatgccatttacaataaggaggaggcaaggcaaatgcatagatgtacaaatatatgtacaacagattttgctttttatttatttataatgtaattttatagaataattctgggatttgagaggatctaaaactatttttctgtataaatattatttgccaaaagtttgtttatattcagaagtctgactatgatgaataaatcttaaatgctttgtttaattaaaaaacaaaaatcaccaatatccaagacatgaagatatcagttcaacaaatactgtagttaagagactaactctccacttgtatgggaactacatttcactcttggttttcaggatataacagcacttcaccgaaatattctttcagccataccactggtaacatttctactaaatctttctgtaacacttaaagaattccctcattcattaccttacagtgtaaacaggagtctaatttgtatcaatactatgttttggttgtaatattcagttcactcacccaatgtacaaccaatgaaataaaagaagcatttaaaagga

SEQ ID NO: 282 - DNA, 3144 bp, Homo sapien
aaatcatgctttcgctctcaataacaaattctcactcattcgacattgccgctgtttaaattaaggtgcatggcagaggcatctccttagctgtcatttttaaaaagaatgttgcaattgatgatctctgtgaacatggaaggtgtgtttgctttaagttagacatatcttatcgaattcttcatttctaggcctttccccctggtgctcttcatcctttaccaaagagacaagcacttgaaaaaagcaatggtaccagcgcggtctttaaccccagcgtcttgcactaccagcaggctctcaccagcgcacagttgcagcaacacgccgcgttcattccaacagataattctgaaataatcagcagaaacggaatggaatgccaagaatctgcattgagaataactaaacattgttactgtacatactatcctgtttcctcctcaatagaattgccacaaactgcatgctaaataaagatgtagttcttctggacagaccacaactctaagaagctagtgctgctatctcatatatgagtattaaatatggtatgcttagtatattccaacctaagatagttaactacctgagaccagctgtgatgtttaaagacataaaggataaagtttacttttaaagggtttctaaacatagtttctgtcctaggaatattgtcttatctccataactatagctgatgcagaaagtccagccagtttactcatttcgattcagaatatttcaaatttagcaataaacaattagcattagttaaaaaagaaacatattccaagggcaggttcgattctagctctaattactgtcatgtcatttacccactggatcaaagggtatgtttcacttcttgacaatataaatgctgcagcaaagatgagaggtgaagtaaaaccgatacctgtcctgcaggtctaaaatttgaatggaaattcaagcacaagtactggggacacatcaaagtgtggtgtttggtttgcctggagatgccacgttgaatcatgtgattctagattaacattaaatagattgaaaaagaaactttgcacggtatgagcttcataccccaccaaacaaagtcttgaaggtattattttacaagtatatttttaaagttgttttataagagagactttgtagaagtgcctagattttgccagacttcatccagcttgacaagattgagaggcccatgccaacagtctaatctaagagattagtctttcaaactcaccatccagttgcctgttacagaataactcttcttaactaaaaacctagtcaaacaaggaagctgtaggtgaggagatctgtataatattctaatttaagtaagtttgagtttagtcactgcaaatttgactgtgactttaatctaaattactatgtaaacaaaaagtagatagtttcactttttaaaaaatccattactgttttgcatttcaaaagttggattaaagggttgtaactgactacagcatggaaaaaaatagttcttttaattctttcaccttaaagcatattttatgtctcaaaagtataaaaaactttaatacaagtacatacatattatatatacacatacatatatatactatatatggatgaaacatattttaatgttgtttacttttttaaatacttggttgatcttcaaggtaatagcgatacaattaaattttgttcagaaagtttgttttaaagtttattttaagcactatcgtaccaaatatttcatatttcacattttatatgttgcacatagcctatacagtacctacatagtttttaaattattgtttaaaaaacaaaacagctgttataaatgaatattatgtgtaattgtttcaaacatccattttctttgtgaacatattagtgattgaagtattttgacttttgagattgaatgtaaaatattttaaatttgggatcatcgcctgttctgaaaactagatgcaccaaccgtatcattatttgtttgaggaaaaaaagaaatctgcattttaattcatgttggtcaaagtcgaattactatctatttatcttatatcgtagatctgataaccctatctaaaagaaagtcacacgctaaatgtattcttacatagtgcttgtatcgttgcatttgttttaatttgtggaaaagtattgtatctaacttgtattactttggtagtttcatctttatgtattattgatatttgtaattttctcaactataacaatgtagttacgctacaacttgcctaaaacattcaaacttgttttcttttttctgtttttttctttgttaattcatttaaactcattgaaaacatagtatacattactaaaaggtaaattatgggaatcactgaaatatttttgtagattaattgttgtaacattgtctttcttttttttcttttgtttcatgattttgatttttaaaattattagcacacaactattttcagccctttaataatggagcatcaaaaacatcacctgtaaccccaagcaaatatagaagactgtattttttactatgatatccattttccagaattgtgattacaatatgcaaagagtcataaatatgccatttacaataaggaggaggcaaggcaaatgcatagatgtacaaatatatgtacaacagattttgctttttatttatttataatgtaattttatagaataattctgggatttgagaggatctaaaactatttttctgtataaatattatttgccaaaagtttgtttatattcagaagtctgactatgatgaataaatcttaaatgctttgtttaattaaaaaacaaaaatcaccaatatccaagacatgaagatatcagttcaacaaatactgtagttaagagactaactctccacttgtatgggaactacatttcactcttggttttcaggatataacagcacttcaccgaaatattctttcagccataccactggtaacatttctactaaatctttctgtaacacttaaagaattccctcattcattaccttacagtgtaaacaggagtctaatttgtatcaatactatgttttggttgtaatattcagttcactcacccaatgtacaaccaatgaaataaaagaagcatttaaaagga

SEQ ID NO: 283 - DNA, 3077 bp, Homo sapien
ctaaacatgcatgcctctctatatgctgccacagttttccagaaagtactgtgcatttgaatcatctttctttatagtggccacatagcagaagtggttaagtgtaaagtttttcagcatgaagggcgggtattgtgcaaatttataattgcatcaaaataatgagagattgaagaaaactctgattttcaaatgtctatttttgaagagtaaaacttaaactcattatttttcctcccagaaggatacctaaatcatgcttgtctttctctttaacaataattctgaaataatcagcagaaacggaatggaatgccaagaatctgcattgagaataactaaacattgttactgtacatactatcctgtttcctcctcaatagaattgccacaaactgcatgctaaataaagatgtagttcttctggacagaccacaactctaagaagctagtgctgctatctcatatatgagtattaaatatggtatgcttagtatattccaacctaagatagttaactacctgagaccagctgtgatgtttaaagacataaaggataaagtttacttttaaagggtttctaaacatagtttctgtcctaggaatattgtcttatctccataactatagctgatgcagaaagtccagccagtttactcatttcgattcagaatatttcaaatttagcaataaacaattagcattagttaaaaaagaaacatattccaagggcaggttcgattctagctctaattactgtcatgtcatttacccactggatcaaagggtatgtttcacttcttgacaatataaatgctgcagcaaagatgagaggtgaagtaaaaccgatacctgtcctgcaggtctaaaatttgaatggaaattcaagcacaagtactggggacacatcaaagtgtggtgtttggtttgcctggagatgccacgttgaatcatgtgattctagattaacattaaatagattgaaaaagaaactttgcacggtatgagcttcataccccaccaaacaaagtcttgaaggtattattttacaagtatatttttaaagttgttttataagagagactttgtagaagtgcctagattttgccagacttcatccagcttgacaagattgagaggcccatgccaacagtctaatctaagagattagtctttcaaactcaccatccagttgcctgttacagaataactcttcttaactaaaaacctagtcaaacaaggaagctgtaggtgaggagatctgtataatattctaatttaagtaagtttgagtttagtcactgcaaatttgactgtgactttaatctaaattactatgtaaacaaaaagtagatagtttcactttttaaaaaatccattactgttttgcatttcaaaagttggattaaagggttgtaactgactacagcatggaaaaaaatagttcttttaattctttcaccttaaagcatattttatgtctcaaaagtataaaaaactttaatacaagtacatacatattatatatacacatacatatatatactatatatggatgaaacatattttaatgttgtttacttttttaaatacttggttgatcttcaaggtaatagcgatacaattaaattttgttcagaaagtttgttttaaagtttattttaagcactatcgtaccaaatatttcatatttcacattttatatgttgcacatagcctatacagtacctacatagtttttaaattattgtttaaaaaacaaaacagctgttataaatgaatattatgtgtaattgtttcaaacatccattttctttgtgaacatattagtgattgaagtattttgacttttgagattgaatgtaaaatattttaaatttgggatcatcgcctgttctgaaaactagatgcaccaaccgtatcattatttgtttgaggaaaaaaagaaatctgcattttaattcatgttggtcaaagtcgaattactatctatttatcttatatcgtagatctgataaccctatctaaaagaaagtcacacgctaaatgtattcttacatagtgcttgtatcgttgcatttgttttaatttgtggaaaagtattgtatctaacttgtattactttggtagtttcatctttatgtattattgatatttgtaattttctcaactataacaatgtagttacgctacaacttgcctaaaacattcaaacttgttttcttttttctgtttttttctttgttaattcatttaaactcattgaaaacatagtatacattactaaaaggtaaattatgggaatcactgaaatatttttgtagattaattgttgtaacattgtctttcttttttttcttttgtttcatgattttgatttttaaaattattagcacacaactattttcagccctttaataatggagcatcaaaaacatcacctgtaaccccaagcaaatatagaagactgtattttttactatgatatccattttccagaattgtgattacaatatgcaaagagtcataaatatgccatttacaataaggaggaggcaaggcaaatgcatagatgtacaaatatatgtacaacagattttgctttttatttatttataatgtaattttatagaataattctgggatttgagaggatctaaaactatttttctgtataaatattatttgccaaaagtttgtttatattcagaagtctgactatgatgaataaatcttaaatgctttgtttaattaaaaaacaaaaatcaccaatatccaagacatgaagatatcagttcaacaaatactgtagttaagagactaactctccacttgtatgggaactacatttcactcttggttttcaggatataacagcacttcaccgaaatattctttcagccataccactggtaacatttctactaaatctttctgtaacacttaaagaattccctcattcattaccttacagtgtaaacaggagtctaatttgtatcaatactatgttttggttgtaatattcagttcactcacccaatgtacaaccaatgaaataaaagaagcatttaaaagga

SEQ ID NO: 284 - DNA, 2887 bp, Homo sapien
tcggtcacacggtattgcccacgattggaacagttccttgcttccccacccgcctatttcctactgaagaccacgcaccccctagcccataattctgaaataatcagcagaaacggaatggaatgccaagaatctgcattgagaataactaaacattgttactgtacatactatcctgtttcctcctcaatagaattgccacaaactgcatgctaaataaagatgtagttcttctggacagaccacaactctaagaagctagtgctgctatctcatatatgagtattaaatatggtatgcttagtatattccaacctaagatagttaactacctgagaccagctgtgatgtttaaagacataaaggataaagtttacttttaaagggtttctaaacatagtttctgtcctaggaatattgtcttatctccataactatagctgatgcagaaagtccagccagtttactcatttcgattcagaatatttcaaatttagcaataaacaattagcattagttaaaaaagaaacatattccaagggcaggttcgattctagctctaattactgtcatgtcatttacccactggatcaaagggtatgtttcacttcttgacaatataaatgctgcagcaaagatgagaggtgaagtaaaaccgatacctgtcctgcaggtctaaaatttgaatggaaattcaagcacaagtactggggacacatcaaagtgtggtgtttggtttgcctggagatgccacgttgaatcatgtgattctagattaacattaaatagattgaaaaagaaactttgcacggtatgagcttcataccccaccaaacaaagtcttgaaggtattattttacaagtatatttttaaagttgttttataagagagactttgtagaagtgcctagattttgccagacttcatccagcttgacaagattgagaggcccatgccaacagtctaatctaagagattagtctttcaaactcaccatccagttgcctgttacagaataactcttcttaactaaaaacctagtcaaacaaggaagctgtaggtgaggagatctgtataatattctaatttaagtaagtttgagtttagtcactgcaaatttgactgtgactttaatctaaattactatgtaaacaaaaagtagatagtttcactttttaaaaaatccattactgttttgcatttcaaaagttggattaaagggttgtaactgactacagcatggaaaaaaatagttcttttaattctttcaccttaaagcatattttatgtctcaaaagtataaaaaactttaatacaagtacatacatattatatatacacatacatatatatactatatatggatgaaacatattttaatgttgtttacttttttaaatacttggttgatcttcaaggtaatagcgatacaattaaattttgttcagaaagtttgttttaaagtttattttaagcactatcgtaccaaatatttcatatttcacattttatatgttgcacatagcctatacagtacctacatagtttttaaattattgtttaaaaaacaaaacagctgttataaatgaatattatgtgtaattgtttcaaacatccattttctttgtgaacatattagtgattgaagtattttgacttttgagattgaatgtaaaatattttaaatttgggatcatcgcctgttctgaaaactagatgcaccaaccgtatcattatttgtttgaggaaaaaaagaaatctgcattttaattcatgttggtcaaagtcgaattactatctatttatcttatatcgtagatctgataaccctatctaaaagaaagtcacacgctaaatgtattcttacatagtgcttgtatcgttgcatttgttttaatttgtggaaaagtattgtatctaacttgtattactttggtagtttcatctttatgtattattgatatttgtaattttctcaactataacaatgtagttacgctacaacttgcctaaaacattcaaacttgttttcttttttctgtttttttctttgttaattcatttaaactcattgaaaacatagtatacattactaaaaggtaaattatgggaatcactgaaatatttttgtagattaattgttgtaacattgtctttcttttttttcttttgtttcatgattttgatttttaaaattattagcacacaactattttcagccctttaataatggagcatcaaaaacatcacctgtaaccccaagcaaatatagaagactgtattttttactatgatatccattttccagaattgtgattacaatatgcaaagagtcataaatatgccatttacaataaggaggaggcaaggcaaatgcatagatgtacaaatatatgtacaacagattttgctttttatttatttataatgtaattttatagaataattctgggatttgagaggatctaaaactatttttctgtataaatattatttgccaaaagtttgtttatattcagaagtctgactatgatgaataaatcttaaatgctttgtttaattaaaaaacaaaaatcaccaatatccaagacatgaagatatcagttcaacaaatactgtagttaagagactaactctccacttgtatgggaactacatttcactcttggttttcaggatataacagcacttcaccgaaatattctttcagccataccactggtaacatttctactaaatctttctgtaacacttaaagaattccctcattcattaccttacagtgtaaacaggagtctaatttgtatcaatactatgttttggttgtaatattcagttcactcacccaatgtacaaccaatgaaataaaagaagcatttaaaagga

SEQ ID NO: 285 - DNA, 2331 bp, Homo sapien
ggatttgtcggaaggaagggctgcagcttacagcaacagagtttagactgtctttgcttcatcatctgaaggtaaaattttccagatacggcagacggctttcagagtacaataaacagggaatgagaactatttacatggaagtttctttctcatgatgcggtggagaagcctcggccacttggttctgccagatgttcctggggttactgtaaatgggaaggacaggcagagctaaacaaggtttatcatttaaaagtgcctgtgtgaagtcacttttgctggaaaactgcagcttgggagctttctttgtattcacatcccactcttctgtcaagtacactttaccctgaccttatgagtggatgaagatacctcagttgtctgactttgccaattgcttaatttcagaatttaaaaaggggaaagaaaaacatcctgctaaaatatgaacatctgagtgtcttattttccaacatcgtcaatagctgtgagcgtcagcattaaatattctcccaaggagtgccatgatattgaagtcactttattaataacagctgtatctgcaaaacagtcaagagactcggacgttgaaagccagagatgacactgagcatgcttttattgcggcctaccatctttaagtgggacatattgattgatgagtgattgcctgtccatacactctctcatcatcctgttccttggattggacttcactaagcaatttatcactcaccttcagacttacatgtgggagttttcacaacagtagttttggaatcattagaacttggattgatttcatcatttaacagaaacaaacagcccaaattactttatcaccatggctttgaacgttgccccagtcagagatacaaaatggctgacattagaagtctgcagacagtttcaaagaggaacatgctcacgctctgatgaagaatgcaaatttgctcatccccccaaaagttgtcaggttgaaaatggaagagtaattgcctgctttgattccctaaagggccgttgttcgagagagaactgcaagtatcttcaccctccgacacacttaaaaactcaactagaaattaatggaaggaacaatttgattcagcaaaaaactgcagcagcaatgcttgcccagcagatgcaatttatgtttccaggaacaccacttcatccagtgcccactttccctgtaggtcccgcgatagggacaaatacggctattagctttgctccttacctagcacctgtaacccctggagttgggttggtcccaacggaaattctgcccaccacgcctgttattgttcccggaagtccaccggtcactgtcccgggctcaactgcaactcagaaacttctcaggactgacaaactggaggtatgcagggagttccagcgaggaaactgtgcccggggagagaccgactgccgctttgcacaccccgcagacagcaccatgatcgacacaagtgacaacaccgtaaccgtttgtatggattacataaaggggcgttgcatgagggagaaatgcaaatattttcaccctcctgcacacttgcaggccaaaatcaaagctgcgcagcaccaagccaaccaagctgcggtggccgcccaggcagccgcggccgcggccacagtcatgactcagtcgactgccaaagcaatgaagcgacctctcgaagcaactgtagacctggcctttccccctggtgctcttcatcctttaccaaagagacaagcacttgaaaaaagcaatggtaccagcgcggtctttaaccccagcgtcttgcactaccagcaggctctcaccagcgcacagttgcagcaacacgccgcgttcattccaacagtacccatgatgcacagcgctacgtccgccactgtctctgcagcaacaactcctgcaacaagtgtccccttcgcagcaacagccacagccaatcagataattctgaaataatcagcagaaacggaatggaatgccaagaatctgcattgagaataactaaacattgttactgtacatactatcctgtttcctcctcaatagaattgccacaaactgcatgctaaataaagatgtagttcttctggacagaccacaactctaagaagctagtgctgctatctcatatatgagtattaaatatggtatgcttagtatattccaacctaagatagttaactacctgagaccagctgtgatggggaccgaactgtgcatggggaccgaactgtgcatggggaccgaactgtgcatggggaccgaactgtgcatggggaccgaactgtgcatggggaccgaactgtgcatggggaccg

SEQ ID NO: 286 - DNA, 1414 bp, Homo sapien
ggatttgtcggaaggaagggctgcagcttacagcaacagagtttagactgtctttgcttcatcatctgaaggtaaaattttccagatacggcagacggctttcagagtacaataaacagggaatgagaactatttacatggaagtttctttctcatgatgcggtggagaagcctcggccacttggttctgccagatgttcctggggttactgtaaatgggaaggacaggcagagctaaacaaggtttatcatttaaaagtgcctgtgtgaagtcacttttgctggaaaactgcagcttgggagctttctttgtattcacatcccactcttctgtcaagtacactttaccctgaccttatgagtggatgaagatacctcagttgtctgactttgccaattgcttaatttcagaatttaaaaaggggaaagaaaaacatcctgctaaaatatgaacatctgagtgtcttattttccaacatcgtcaatagctgtgagcgtcagcattaaatattctcccaaggagtgccatgatattgaagtcactttattaataacagctgtatctgcaaaacagtcaagagactcggacgttgaaagccagagatgacactgagcatgcttttattgcggcctaccatctttaagtgggacatattgattgatgagtgattgcctgtccatacactctctcatcatcctgttccttggattggacttcactaagcaatttatcactcaccttcagacttacatgtgggagttttcacaacagtagttttggaatcattagaacttggattgatttcatcatttaacagaaacaaacagcccaaattactttatcaccatggctttgaacgttgccccagtcagagatacaaaatggctgacattagaagtctgcagacagtttcaaagaggaacatgctcacgctctgatgaagaatgcaaatttgctcatccccccaaaagttgtcaggttgaaaatggaagagtaattgcctgctttgattccctaaagggccgttgttcgagagagaactgcaagtatcttcaccctccgacacacttaaaaactcaactagaaattaatggaaggaacaatttgattcagcaaaaaactgcagcagcaatgcttgcccagcagatgcaatttatgtttccaggaacaccacttcatccagtggtgagtacatctttattcagtgatgagttggatggttacagtgttggtatggatgatgccacgttgacctagggtggcctctctccactttgtcactttggttacaattaaagcaaatagctttaaagctcaatagatgaaggaaaataggcttttaaaaaaattaatagaaaaatatttgtggaaataggaggcaaagacaatttctaatcaatatctgggaaatct

SEQ ID NO: 287 - DNA, 446 bp, Homo sapien
gtctgactatgatgtataaatcttaaatgctttggtttctaattggacggagcatttaagatttattcatcatagtcagacttctgactatgatgaataaatcttaaatgctttgtttaattaaaaaacaaaaatcaccaatatccaagacatgaagatatcagttcaacaaatactgtagttaagagactaactctccacttgtatgggaactacatttcactcttggttttcaggatataacagcacttcaccgaaatattctttcagccataccactggtaacatttctactaaatctttctgtaacacttaaagaattccctcattcattaccttacagtgtaaacaggagtctaatttgtatcaatactatgttttggttgtaatattcagttcactcacccaatgtacaaccaatgaaataaaagaagcatttaaaagga

SEQ ID NO: 288 - DNA, 1829 bp, Homo sapien
aagcttgcggccgcggccacagtcatggcctttccccctggtgctcttcatcctttaccaaagagacaagcacttgaaaaaagcaatggtaccagcgcggtctttaaccccagcgtcttgcactaccagcaggctctcaccagcgcacagttgcagcaacacgccgcgttcattccaacaggtatgtgcccttactgccctacgtcctgtgcccttctggtcatgtgctttcttctcatttctctaagctgtttggtggcatctagtttgcttttgaaggtataatacagtttgaaattcatcgttgtcctagctatctaaatgtatttaccttactttgaatgatagctaaagactgttaggattctaaagccaaatatttgatagattgaagagacagatttaacccatgagaaacagcagttagggcttttggtttcttgtatttgcacaagccctgtaaaattgtttatgtaaataagaccttttatgtgtgacaattgaaatttgtccttaactctgaatgacctaaaaatagcaattccagtaaatactaaccatttttttctatttctattcagagcactaaaacaatgaggctattcaaattaaagcaattctctactcatatttttatattcattctatctctttctccatccttctcaactttcaccaagttcacaagtatatagagctcttatcctcagtgtctaagccaatgcctgatactattacgtacgatgtgcattaactatgattccactaaaagatccattgtaatagtcatagaatcttagagtttaaaggactcttagtgatctcctcatccagctgattgttttacagatgagaaaactgaggccccctaaatgagaagtgactttccaaggtgccacaactaatgagaaaaagaactgagtttccctgtgaccaaacccatttacatcacattctaccacctgggcccgcctatatatacacattccacagagttctcctgaaaaaagaaaaaagcagataaaagtgaatttttaaataactgaccccaaaaagtcagataaaagtaaaaaaacaaaagtataaatcatgtcatccctcccccatttgcaccgacatctctaaccacagacacacacacgcacaccatacgcaaagatagtcaccataattgaccatgtttttcaccttttagtcaatgttagaagcaaggggtaacttaagtcctggtgggaagaccatccattgagttctttgaaagtcaacatttttcagcccacgatagtgaaatgaaagtaaatataaatgaataacaattctaacaaaaagagttttttgattcaaatccattagtttgaacttttcgagcttattatccatttccttaaatcccatagcttatcagagttaacatcagagggaggtaaaatatttctgtgatattctttgtataaaatctacactttgaaatggattagtaacctgtgaacaatacatattttagttaacatataaattatgtgagcaaagtggttttcagtgtttttttcttattttagttttgaacctgtcttaaactcacagacttgtagaagaaatctctaattcagtatttattaggagttcacttttgccctattacagccttaattagtgacatcccagtgctgttacagcatagcagtgtcttaatatgtaatctaattgaaataacacatttgtaaaataattactagaaggtaaacttacgttaatgtcctgtgtggtttctacaaagtgtgtcattgtagacctcttggccactagatattttaagataaaaaaaaaaa

SEQ ID NO: 289 - DNA, 4699 bp, Homo sapien
ggatttgtcggaaggaagggctgcagcttacagcaacagagtttagactgtctttgcttcatcatctgaaggtaaaattttccagatacggcagacggctttcagagtacaataaacagggaatgagaactatttacatggaagtttctttctcatgatgcggtggagaagcctcggccacttggttctgccagatgttcctggggttactgtaaatgggaaggacaggcagagctaaacaaggtttatcatttaaaagtgcctgtgtgaagtcacttttgctggaaaactgcagcttgggagctttctttgtattcacatcccactcttctgtcaagtacactttaccctgaccttatgagtggatgaagatacctcagttgtctgactttgccaattgcttaatttcagaatttaaaaaggggaaagaaaaacatcctgctaaaatatgaacatctgagtgtcttattttccaacatcgtcaatagctgtgagcgtcagcattaaatattctcccaaggagtgccatgatattgaagtcactttattaataacagctgtatctgcaaaacagtcaagagactcggacgttgaaagccagagatgacactgagcatgcttttattgcggcctaccatctttaagtgggacatattgattgatgagtgattgcctgtccatacactctctcatcatcctgttccttggattggacttcactaagcaatttatcactcaccttcagacttacatgtgggagttttcacaacagtagttttggaatcattagaacttggattgatttcatcatttaacagaaacaaacagcccaaattactttatcaccatggctttgaacgttgccccagtcagagatacaaaatggctgacattagaagtctgcagacagtttcaaagaggaacatgctcacgctctgatgaagaatgcaaatttgctcatccccccaaaagttgtcaggttgaaaatggaagagtaattgcctgctttgattccctaaagggccgttgttcgagagagaactgcaagtatcttcaccctccgacacacttaaaaactcaactagaaattaatggaaggaacaatttgattcagcaaaaaactgcagcagcaatgcttgcccagcagatgcaatttatgtttccaggaacaccacttcatccagtgcccactttccctgtaggtcccgcgatagggacaaatacggctattagctttgctccttacctagcacctgtaacccctggagttgggttggtcccaacggaaattctgcccaccacgcctgttattgttcccggaagtccaccggtcactgtcccgggctcaactgcaactcagaaacttctcaggactgacaaactggaggtatgcagggagttccagcgaggaaactgtgcccggggagagaccgactgccgctttgcacaccccgcagacagcaccatgatcgacacaagtgacaacaccgtaaccgtttgtatggattacataaaggggcgttgcatgagggagaaatgcaaatattttcaccctcctgcacacttgcaggccaaaatcaaagctgcgcagcaccaagccaaccaagctgcggtggccgcccaggcagccgcggccgcggccacagtcatggcctttccccctggtgctcttcatcctttaccaaagagacaagcacttgaaaaaagcaatggtaccagcgcggtctttaaccccagcgtcttgcactaccagcaggctctcaccagcgcacagttgcagcaacacgccgcgttcattccaacagtacccatgatgcacagcgctacgtccgccactgtctctgcagcaacaactcctgcaacaagtgtccccttcgcagcaacagccacagccaatcagataattctgaaataatcagcagaaacggaatggaatgccaagaatctgcattgagaataactaaacattgttactgtacatactatcctgtttcctcctcaatagaattgccacaaactgcatgctaaataaagatgtagttcttctggacagaccacaactctaagaagctagtgctgctatctcatatatgagtattaaatatggtatgcttagtatattccaacctaagatagttaactacctgagaccagctgtgatgtttaaagacataaaggataaagtttacttttaaagggtttctaaacatagtttctgtcctaggaatattgtcttatctccataactatagctgatgcagaaagtccagccagtttactcatttcgattcagaatatttcaaatttagcaataaacaattagcattagttaaaaaagaaacatattccaagggcaggttcgattctagctctaattactgtcatgtcatttacccactggatcaaagggtatgtttcacttcttgacaatataaatgctgcagcaaagatgagaggtgaagtaaaaccgatacctgtcctgcaggtctaaaatttgaatggaaattcaagcacaagtactggggacacatcaaagtgtggtgtttggtttgcctggagatgccacgttgaatcatgtgattctagattaacattaaatagattgaaaaagaaactttgcacggtatgagcttcataccccaccaaacaaagtcttgaaggtattattttacaagtatatttttaaagttgttttataagagagactttgtagaagtgcctagattttgccagacttcatccagcttgacaagattgagaggcccatgccaacagtctaatctaagagattagtctttcaaactcaccatccagttgcctgttacagaataactcttcttaactaaaaacctagtcaaacaaggaagctgtaggtgaggagatctgtataatattctaatttaagtaagtttgagtttagtcactgcaaatttgactgtgactttaatctaaattactatgtaaacaaaaagtagatagtttcactttttaaaaaatccattactgttttgcatttcaaaagttggattaaagggttgtaactgactacagcatggaaaaaaatagttcttttaattctttcaccttaaagcatattttatgtctcaaaagtataaaaaactttaatacaagtacatacatattatatatacacatacatatatatactatatatggatgaaacatattttaatgttgtttacttttttaaatacttggttgatcttcaaggtaatagcgatacaattaaattttgttcagaaagtttgttttaaagtttattttaagcactatcgtaccaaatatttcatatttcacattttatatgttgcacatagcctatacagtacctacatagtttttaaattattgtttaaaaaacaaaacagctgttataaatgaatattatgtgtaattgtttcaaacatccattttctttgtgaacatattagtgattgaagtattttgacttttgagattgaatgtaaaatattttaaatttgggatcatcgcctgttctgaaaactagatgcaccaaccgtatcattatttgtttgaggaaaaaaagaaatctgcattttaattcatgttggtcaaagtcgaattactatctatttatcttatatcgtagatctgataaccctatctaaaagaaagtcacacgctaaatgtattcttacatagtgcttgtatcgttgcatttgttttaatttgtggaaaagtattgtatctaacttgtattactttggtagtttcatctttatgtattattgatatttgtaattttctcaactataacaatgtagttacgctacaacttgcctaaaacattcaaacttgttttcttttttctgtttttttctttgttaattcatttaaactcattgaaaacatagtatacattactaaaaggtaaattatgggaatcactgaaatatttttgtagattaattgttgtaacattgtctttcttttttttcttttgtttcatgattttgatttttaaaattattagcacacaactattttcagccctttaataatggagcatcaaaaacatcacctgtaaccccaagcaaatatagaagactgtattttttactatgatatccattttccagaattgtgattacaatatgcaaagagtcataaatatgccatttacaataaggaggaggcaaggcaaatgcatagatgtacaaatatatgtacaacagattttgctttttatttatttataatgtaattttatagaataattctgggatttgagaggatctaaaactatttttctgtataaatattatttgccaaaagtttgtttatattcagaagtctgactatgatgaataaatcttaaatgctttgtttaattaaaaaacaaaaatcaccaatatccaagacatgaagatatcagttcaacaaatactgtagttaagagactaactctccacttgtatgggaactacatttcactcttggttttcaggatataacagcacttcaccgaaatattctttcagccataccactggtaacatttctactaaatctttctgtaacacttaaagaattccctcattcattaccttacagtgtaaacaggagtctaatttgtatcaatactatgttttggttgtaatattcagttcactcacccaatgtacaaccaatgaaataaaagaagcatttaaaagga

SEQ ID NO: 290 - DNA, 3915 bp, Homo sapien
catagacttggccaacttgaaaatcaggctgtaatcaaagggttttgtgactcctctccctttgagaaacatgtagaataaatcaaagattattagtcagtattctatagcttttactaccttagtgttataacatttaatagtttggaatgttgagtaattagagttgaaattattttcttttgttgagaacactttcatagggacaaaagcttaatctagttcctgtaactagaggttttttatgatgttctctcatatttctgtatggtttggggaagagagggtctacatggatgtcatttttattataggtcagcattgagctatacaattaacacagagtatatgatgaatacattttgctcaaatgacatttgctggtaattttttaaagttttattctaaataactctttctcctgtgttgtcttcctttaacagcccactttccctgtaggtcccgcgatagggacaaatacggctattagctttgctccttacctagcacctgtaacccctggagttgggttggtcccaacggaaattctgcccaccacgcctgttattgttcccggaagtccaccggtcactgtcccgggctcaactgcaactcagaaacttctcaggactgacaaactggaggtatgcagggagttccagcgaggaaactgtgcccggggagagaccgactgccgctttgcacaccccgcagacagcaccatgatcgacacaagtgacaacaccgtaaccgtttgtatggattacataaaggggcgttgcatgagggagaaatgcaaatattttcaccctcctgcacacttgcaggccaaaatcaaagctgcgcagcaccaagccaaccaagctgcggtggccgcccaggcagccgcggccgcggccacagtcatgactcagtcgactgccaaagcaatgaagcgacctctcgaagcaactgtagacctggcctttccccctggtgctcttcatcctttaccaaagagacaagcacttgaaaaaagcaatggtaccagcgcggtctttaaccccagcgtcttgcactaccagcaggctctcaccagcgcacagttgcagcaacacgccgcgttcattccaacagataattctgaaataatcagcagaaacggaatggaatgccaagaatctgcattgagaataactaaacattgttactgtacatactatcctgtttcctcctcaatagaattgccacaaactgcatgctaaataaagatgtagttcttctggacagaccacaactctaagaagctagtgctgctatctcatatatgagtattaaatatggtatgcttagtatattccaacctaagatagttaactacctgagaccagctgtgatgtttaaagacataaaggataaagtttacttttaaagggtttctaaacatagtttctgtcctaggaatattgtcttatctccataactatagctgatgcagaaagtccagccagtttactcatttcgattcagaatatttcaaatttagcaataaacaattagcattagttaaaaaagaaacatattccaagggcaggttcgattctagctctaattactgtcatgtcatttacccactggatcaaagggtatgtttcacttcttgacaatataaatgctgcagcaaagatgagaggtgaagtaaaaccgatacctgtcctgcaggtctaaaatttgaatggaaattcaagcacaagtactggggacacatcaaagtgtggtgtttggtttgcctggagatgccacgttgaatcatgtgattctagattaacattaaatagattgaaaaagaaactttgcacggtatgagcttcataccccaccaaacaaagtcttgaaggtattattttacaagtatatttttaaagttgttttataagagagactttgtagaagtgcctagattttgccagacttcatccagcttgacaagattgagaggcccatgccaacagtctaatctaagagattagtctttcaaactcaccatccagttgcctgttacagaataactcttcttaactaaaaacctagtcaaacaaggaagctgtaggtgaggagatctgtataatattctaatttaagtaagtttgagtttagtcactgcaaatttgactgtgactttaatctaaattactatgtaaacaaaaagtagatagtttcactttttaaaaaatccattactgttttgcatttcaaaagttggattaaagggttgtaactgactacagcatggaaaaaaatagttcttttaattctttcaccttaaagcatattttatgtctcaaaagtataaaaaactttaatacaagtacatacatattatatatacacatacatatatatactatatatggatgaaacatattttaatgttgtttacttttttaaatacttggttgatcttcaaggtaatagcgatacaattaaattttgttcagaaagtttgttttaaagtttattttaagcactatcgtaccaaatatttcatatttcacattttatatgttgcacatagcctatacagtacctacatagtttttaaattattgtttaaaaaacaaaacagctgttataaatgaatattatgtgtaattgtttcaaacatccattttctttgtgaacatattagtgattgaagtattttgacttttgagattgaatgtaaaatattttaaatttgggatcatcgcctgttctgaaaactagatgcaccaaccgtatcattatttgtttgaggaaaaaaagaaatctgcattttaattcatgttggtcaaagtcgaattactatctatttatcttatatcgtagatctgataaccctatctaaaagaaagtcacacgctaaatgtattcttacatagtgcttgtatcgttgcatttgttttaatttgtggaaaagtattgtatctaacttgtattactttggtagtttcatctttatgtattattgatatttgtaattttctcaactataacaatgtagttacgctacaacttgcctaaaacattcaaacttgttttcttttttctgtttttttctttgttaattcatttaaactcattgaaaacatagtatacattactaaaaggtaaattatgggaatcactgaaatatttttgtagattaattgttgtaacattgtctttcttttttttcttttgtttcatgattttgatttttaaaattattagcacacaactattttcagccctttaataatggagcatcaaaaacatcacctgtaaccccaagcaaatatagaagactgtattttttactatgatatccattttccagaattgtgattacaatatgcaaagagtcataaatatgccatttacaataaggaggaggcaaggcaaatgcatagatgtacaaatatatgtacaacagattttgctttttatttatttataatgtaattttatagaataattctgggatttgagaggatctaaaactatttttctgtataaatattatttgccaaaagtttgtttatattcagaagtctgactatgatgaataaatcttaaatgctttgtttaattaaaaaacaaaaatcaccaatatccaagacatgaagatatcagttcaacaaatactgtagttaagagactaactctccacttgtatgggaactacatttcactcttggttttcaggatataacagcacttcaccgaaatattctttcagccataccactggtaacatttctactaaatctttctgtaacacttaaagaattccctcattcattaccttacagtgtaaacaggagtctaatttgtatcaatactatgttttggttgtaatattcagttcactcacccaatgtacaaccaatgaaataaaagaagcatttaaaagga

SEQ ID NO: 291 - DNA, 3507 bp, Homo sapien
ggatttgtcggaaggaagggctgcagcttacagcaacagagtttagactgtctttgcttcatcatctgaaggtaaaattttccagatacggcagacggctttcagagtacaataaacagggaatgagaactatttacatggaagtttctttctcatgatgcggtggagaagcctcggccacttggttctgccagatgttcctggggttactgtaaatgggaaggacaggcagagctaaacaaggtttatcatttaaaagtgcctgtgtgaagtcacttttgctggaaaactgcagcttgggagctttctttgtattcacatcccactcttctgtcaagtacactttaccctgaccttatgagtggatgaagatacctcagttgtctgactttgccaattgcttaatttcagaatttaaaaaggggaaagaaaaacatcctgctaaaatatgaacatctgagtgtcttattttccaacatcgtcaatagctgtgagcgtcagcattaaatattctcccaaggagtgccatgatattgaagtcactttattaataacagctgtatctgcaaaacagtcaagagactcggacgttgaaagccagagatgacactgagcatgcttttattgcggcctaccatctttaagtgggacatattgattgatgagtgattgcctgtccatacactctctcatcatcctgttccttggattggacttcactaagcaatttatcactcaccttcagacttacatgtgggagttttcacaacagtagttttggaatcattagaacttggattgatttcatcatttaacagaaacaaacagcccaaattactttatcaccatggctttgaacgttgccccagtcagagatacaaaatggctgacattagaagtctgcagacagtttcaaagaggaacatgctcacgctctgatgaagaatgcaaatttgctcatccccccaaaagttgtcaggttgaaaatggaagagtaattgcctgctttgattccctaaagggccgttgttcgagagagaactgcaagtatcttcaccctccgacacacttaaaaactcaactagaaattaatggaaggaacaatttgattcagcaaaaaactgcagcagcaatgcttgcccagcagatgcaatttatgtttccaggaacaccacttcatccagtgcccactttccctgtaggtcccgcgatagggacaaatacggctattagctttgctccttacctagcacctgtaacccctggagttgggttggtcccaacggaaattctgcccaccacgcctgttattgttcccggaagtccaccggtcactgtcccgggctcaactgcaactcagaaacttctcaggactgacaaactggaggtatgcagggagttccagcgaggaaactgtgcccggggagagaccgactgccgctttgcacaccccgcagacagcaccatgatcgacacaagtgacaacaccgtaaccgtttgtatggattacataaaggggcgttgcatgagggagaaatgcaaatattttcaccctcctgcacacttgcaggccaaaatcaaagctgcgcagcaccaagccaaccaagctgcggtggccgcccaggcagccgcggccgcggccacagtcatgactcagtcgactgccaaagcaatgaagcgacctctcgaagcaactgtagacctggcctttccccctggtgctcttcatcctttaccaaagagacaagcacttgaaaaaagcaatggtaccagcgcggtctttaaccccagcgtcttgcactaccagcaggctctcaccagcgcacagttgcagcaacacgccgcgttcattccaacaggtatgtgcccttactgccctacgtcctgtgcccttctggtcatgtgctttcttctcatttctctaagctgtttggtggcatctagtttgcttttgaaggtataatacagtttgaaattcatcgttgtcctagctatctaaatgtatttaccttactttgaatgatagctaaagactgttaggattctaaagccaaatatttgatagattgaagagacagatttaacccatgagaaacagcagttagggcttttggtttcttgtatttgcacaagccctgtaaaattgtttatgtaaataagaccttttatgtgtgacaattgaaatttgtccttaactctgaatgacctaaaaatagcaattccagtaaatactaaccatttttttctatttctattcagagcactaaaacaatgaggctattcaaattaaagcaattctctactcatatttttatattcattctatctctttctccatccttctcaactttcaccaagttcacaagtatatagagctcttatcctcagtgtctaagccaatgcctgatactattacgtacgatgtgcattaactatgattccactaaaagatccattgtaatagtcatagaatcttagagtttaaaggactcttagtgatctcctcatccagctgattgttttacagatgagaaaactgaggccccctaaatgagaagtgactttccaaggtgccacaactaatgagaaaaagaactgagtttccctgtgaccaaacccatttacatcacattctaccacctgggcccgcctatatatacacattccacagagttctcctgaaaaaagaaaaaagcagataaaagtgaatttttaaataactgaccccaaaaagtcagataaaagtaaaaaaacaaaagtataaatcatgtcatccctcccccatttgcaccgacatctctaaccacagacacacacacgcacaccatacgcaaagatagtcaccataattgaccatgtttttcaccttttagtcaatgttagaagcaaggggtaacttaagtcctggtgggaagaccatccattgagttctttgaaagtcaacatttttcagcccacgatagtgaaatgaaagtaaatataaatgaataacaattctaacaaaaagagttttttgattcaaatccattagtttgaacttttcgagcttattatccatttccttaaatcccatagcttatcagagttaacatcagagggaggtaaaatatttctgtgatattctttgtataaaatctacactttgaaatggattagtaacctgtgaacaatacatattttagttaacatataaattatgtgagcaaagtggttttcagtgtttttttcttattttagttttgaacctgtcttaaactcacagacttgtagaagaaatctctaattcagtatttattaggagttcacttttgccctattacagccttaattagtgacatcccagtgctgttacagcatagcagtgtcttaatatgtaatctaattgaaataacacatttgtaaaataattactagaaggtaaacttacgttaatgtcctgtgtggtttctacaaagtgtgtcattgtagacctcttggccactagatattttaagataaaaaaaaaaa

SEQ ID NO: 292 - DNA, 1988 bp, Homo sapien
ggatttgtcggaaggaagggctgcagcttacagcaacagagtttagactgtctttgcttcatcatctgaaggtaaaattttccagatacggcagacggctttcagagtacaataaacagggaatgagaactatttacatggaagtttctttctcatgatgcggtggagaagcctcggccacttggttctgccagatgttcctggggttactgtaaatgggaaggacaggcagagctaaacaaggtttatcatttaaaagtgcctgtgtgaagtcacttttgctggaaaactgcagcttgggagctttctttgtattcacatcccactcttctgtcaagtacactttaccctgaccttatgagtggatgaagatacctcagttgtctgactttgccaattgcttaatttcagaatttaaaaaggggaaagaaaaacatcctgctaaaatatgaacatctgagtgtcttattttccaacatcgtcaatagctgtgagcgtcagcattaaatattctcccaaggagtgccatgatattgaagtcactttattaataacagctgtatctgcaaaacagtcaagagactcggacgttgaaagccagagatgacactgagcatgcttttattgcggcctaccatctttaagtgggacatattgattgatgagtgattgcctgtccatacactctctcatcatcctgttccttggattggacttcactaagcaatttatcactcaccttcagacttacatgtgggagttttcacaacagtagttttggaatcattagaacttggattgatttcatcatttaacagaaacaaacagcccaaattactttatcaccatggctttgaacgttgccccagtcagagatacaaaatggctgacattagaagtctgcagacagtttcaaagaggaacatgctcacgctctgatgaagaatgcaaatttgctcatccccccaaaagttgtcaggttgaaaatggaagagtaattgcctgctttgattccctaaagggccgttgttcgagagagaactgcaagtatcttcaccctccgacacacttaaaaactcaactagaaattaatggaaggaacaatttgattcagcaaaaaactgcagcagcaatgcttgcccagcagatgcaatttatgtttccaggaacaccacttcatccagtgcccactttccctgtaggtcccgcgatagggacaaatacggctattagctttgctccttacctagcacctgtaacccctggagttgggttggtcccaacggaaattctgcccaccacgcctgttattgttcccggaagtccaccggtcactgtcccgggctcaactgcaactcagaaacttctcaggactgacaaactggaggtatgcagggagttccagcgaggaaactgtgcccggggagagaccgactgccgctttgcacaccccgcagacagcaccatgatcgacacaagtgacaacaccgtaaccgtttgtatggattacataaaggggcgttgcatgagggagaaatgcaaatattttcaccctcctgcacacttgcaggccaaaatcaaagctgcgcagcaccaagccaaccaagctgcggtggccgcccaggcagccgcggccgcggccacagtcatggcctttccccctggtgctcttcatcctttaccaaagagacaagcacttgaaaaaagcaatggtaccagcgcggtctttaaccccagcgtcttgcactaccagcaggctctcaccagcgcacagttgcagcaacacgccgcgttcattccaacagtacccatgatgcacagcgctacgtccgccactgtctctgcagcaacaactcctgcaacaagtgtccccttcgcagcaacagccacagccaatcagataattctgaaatattctgaatcgaaatgagtaaactggctggactttctgcatcagctatagttatggagataagacaatattccta

SEQ ID NO: 293 - DNA, 2129 bp, Homo sapien
  misc_feature (167)..(167): n=a,c,g or t
  misc_feature (252)..(309): n=a,c,g or t
ctgaataatggagataataacacctaagtaggcacgttcctggctttaagtaacaaacacccactaacaggggcttaaacaaatatatgttcatttttctgacataaggagtcgcagccagttgggtgtggacattggagaagcaactcagtaatgtcagaggtttnggatctgcttctttgcaattttctcattctttccctcatggtcacaaaatggctgctgtagttccagccatcaagtctgtatttnnnnnnnnnnnnnnnnnnnnnnnnnnnnnnnnnnnnnnnnnnnnnnnnnnnnnnnnnnctcatgagccaggatccctggggaatttgaagtcagtgtgaccagggttctgtggctctggggtcagagctgggacacaggacccagcaggagggccaccaccccttccttttggaaacagctctggttccaagcagcaatcaggtaggaggatcggggctttggctgatgatgcacacacaagatgctgatggtgtacggtgagatattgtgaacgcaacaactggagctgtagttggcgtgtgtgagtgtgtacctgcggttctgtttagtggcgagacaaggtatgtttcagtactgctttcacggcaactgtgtaatgcatatgctctttctacactagcggtttgctcagttttgtctgtccggttaagttggagaaagaaccaagttgtgttgttctctggagggggtgctgctgcctctccttgagtagttctgtgacccccaatccagctgttttgtagagaatccttctagcttctggtatgcctgctctccagcagctggaaacagatcttcctgcctgaccaaagctccttgtttcttgcgtggcatgtttgttcttcccgatccggtggctgtcgtagccgagggcctgcctgccaccttcctttatcatttgccctgttggggttcagggtgcatccttagcccaggacctgctcttccagcatcatgggttttttcctaaagatctcaacggctcccttgggctccataaaatatttcttttttaaaaaagcagactcctttcatgcattgggatgaacggccctcttgtctgggtgctgggctacagcaaacaaatgtgtttgaatcccagtattccagagattcctggtggtgggctgtctagaagaggcgaggctggatctcacggtttttaaactgtatttttacccctttgggacccatacctgtgccctggagtctttcatgaggcacgtgggtcctctgcatcctcactctcccccctagcccaggtgcagccccgggaggggtgccctgaccccgccttaaacaaccaactttcccaccgaatcccatctggcggggggggggggggcggtttgggtgccaagtgccctggaaacctattgtcttttggctcagccaaaagaaacattccctccttcctttccttccgggcttgggggaaccttcgtaaaaatcatagttagggttaagtccaagcagtgaggcctgacctgggctctgctctccttgttgagacactaacaggcagttgggaggaaaatctgcatttgactccaccctctttggggcaaaggagaaacaggtgacccgagggggggcaggccagaggagggcgactcgtgcacagggacccccacccttggaccccgctgtccttttctagttgtttacttggtggtggcagccagtctgaccttgtctgtggtctgactgttcctaagtgtgtaactttcagtattatctgtgacagatggttctgtggtgaaaaaggtttattatattccttatggctgccttgtacaaaatccgttagaaacgctaatgtaagatatcagatttctaacaagacaaaaacagcattatggagttaaaagatttttacaactgggtcttgattttgatgtgagctggtttttagctctcaaatgttgtcacttaaataaaaaccttctttgcctttacaatgtgttttggtctgaactaagttgagaaacctttccctttctacatgttctcccttgggtgggattgggggcagactggctcggagcagaggtggatgagggccagaccccaaaccacaaattacaaatctatag

SEQ ID NO: 294 - DNA, 1700 bp, Homo sapien
agaggaagagagagagagagctcatgagccaggatccctggggaatttgaagtcagtgtgaccagggttctgtggctctggggtcagagctgggacacaggacccagcaggagggccaccaccccttccttttggaaacagctctggttccaagcagcaatcaggtaggaggatcggggctttggctgatgatgcacacacaagatgctgatggtgtacggtgagatattgtgaacgcaacaactggagctgtagttggcgtgtgtgagtgtgtacctgcggttctgtttagtggcgagacaaggtatgtttcagtactgctttcacggcaactgtgtaatgcatatgctctttctacactagcggtttgctcagttttgtctgtccggttaagttggagaaagaaccaagttgtgttgttctctggagggggtgctgctgcctctccttgagtagttctgtgacccccaatccagctgttttgtagagaatccttctagcttctggtatgcctgctctccagcagctggaaacagatcttcctgcctgaccaaagctccttgtttcttgcgtggcatgtttgttcttcccgatccggtggctgtcgtagccgagggcctgcctgccaccttcctttatcatttgccctgttggggttcagggtgcatccttagcccaggacctgctcttccagcatcatgggttttttcctaaagatctcaacggctcccttgggctccataaaatatttcttttttaaaaaagcagactcctttcatgcattgggatgaacggccctcttgtctgggtgctgggctacagcaaacaaatgtgtttgaatcccagtattccagagattcctggcggtgggctgtctagaagaggcgaggctggatctcacggtttttaaactgtatttttacccctttgggacccatacctgtgccctggagtctttcatgaggcacgtgggtcctctgcatcctcactctcccccctagcccaggtgcagccccgggaggggtgccctgaccccgccttaaacaaccaactttcccaccgaatcccatctggcgggggggggggggggtttgggtgccaagtgccctggaaacctattgtcttttggctcagccaaaagaaacattccctccttcctttccttccgggcttgggggaaccttcgtaaaaatcatagttagggttaagtccaagcagtgaggcctgacctgggctctgctctccttgttgagacactaacaggcagttgggaggaaaatctgcatttgactccaccctctttggggcaaaggagaaacaggtgacccgagggggggcaggccagaggagggcgactcgtgcacagggacccccacccttggaccccgctgtccttttctagttgtttacttggtggtggcagccagtctgaccttgtctgtggtctgactgttcctaagtgtgtaactttcagtattatctgtgacagatggttctgtggtgaaaaaggtttattatattccttatggctgccttgtacaaaatccgttagaaacgctaatgtaagatatcagatttctaacaagacaaaaacagcattatggagttaaaagatttttacaactgggtcttgattttgatgtgagctggtttttagctctcaaatgttgtcacttaaataaaaaccttctttgccttta

SEQ ID NO: 295 - DNA, 172 bp, Homo sapien
tgattttgtcacactatatacagataatacatacagtgtatatcagatttctaacaagacaaaaacagcattatggagttaaaagatttttacaactgggtcttgattttgatgtgagctggtttttagctctcaaatgttgtcacttaaataaaaaccttctttgccttta

SEQ ID NO: 296 - DNA, 1739 bp, Homo sapien
agaggaagagagagagagagctcatgagccaggatccctggggaatttgaagtcagtgtgaccagggttctgtggctctggggtcagagctgggacacaggacccagcaggagggccaccaccccttccttttggaaacagctctggttccaagcagcaatcaggtaggaggatcggggctttggctgatgatgcacacacaagatgctgatggtgtacggtgagatattgtgaacgcaacaactggagctgtagttggcgtgtgtgagtgtgtacctgcggttctgtttagtggcgagacaaggtatgtttcagtactgctttcacggcaactgtgtaatgcatatgctctttctacactagcggtttgctcagttttgtctgtccggttaagttggagaaagaaccaagttgtgttgttctctggagggggtgctgctgcctctccttgagtagttctgtgacccccaatccagctgttttgtagagaatccttctagcttctggtatgcctgctctccagcagctggaaacagatcttcctgcctgaccaaagctccttgtttcttgcgtggcatgtttgttcttcccgatccggtggctgtcgtagccgagggcctgcctgccaccttcctttatcatttgccctgttggggttcagggtgcatccttagcccaggacctgctcttccagcatcatgggttttttcctaaagatctcaacggctcccttgggctccataaaatatttcttttttaaaaaagcagactcctttcatgcattgggatgaacggccctcttgtctgggtgctgggctacagcaaacaaatgtgtttgaatcccagtattccagagattcctggcggtgggctgtctagaagaggcgaggctggatctcacggtttttaaactgtatttttacccctttgggacccatacctgtgccctggagtctttcatgaggcacgtgggtcctctgcatcctcactctcccccctagcccaggtgcagccccgggaggggtgccctgaccccgccttaaacaaccaactttcccaccgaatcccatctggcgggggggggggggggtttgggtgccaagtgccctggaaacctattgtcttttggctcagccaaaagaaacattccctccttcctttccttccgggcttgggggaaccttcgtaaaaatcatagttagggttaagtccaagcagtgaggcctgacctgggctctgctctccttgttgagacactaacaggcagttgggaggaaaatctgcatttgactccaccctctttggggcaaaggagaaacaggtgacccgagggggggcaggccagaggagggcgactcgtgcacagggacccccacccttggaccccgctgtccttttctagttgtttacttggtggtggcagccagtctgaccttgtctgtggtctgactgttcctaagtgtgtaactttcagtattatctgtgacagatggttctgtggtgaaaaaggtttattatattccttatggctgccttgtacaaaatccgttagaaacgctaatgtaagatatcagatttctaacaagacaaaaacagcattatggagttaaaagatttttacaactgggtcttgattttgatgtgagctggtttttagctctcaaatgttgtcacttaaataaaaaccttctttgcctttaaaaaaaaaagtcgacgcggccgcgaatttagtagtagta

SEQ ID NO: 297 - DNA, 1365 bp, Homo sapien
ctggcaaaacagcacaatgagatcatgtagacagcggcggttttgtctgtccggttaagttggagaaagaaccaagttgtgttgttctctggagggggtgctgctgcctctccttgagtagttctgtgacccccaatccagctgttttgtagagaatccttctagcttctggtatgcctgctctccagcagctggaaacagatcttcctgcctgaccaaagctccttgtttcttgcgtggcatgtttgttcttcccgatccggtggctgtcgtagccgagggcctgcctgccaccttcctttatcatttgccctgttggggttcagggtgcatccttagcccaggacctgctcttccagcatcatgggttttttcctaaagatctcaacggctcccttgggctccataaaatatttcttttttaaaaaagcagactcctttcatgcattgggatgaacggccctcttgtctgggtgctgggctacagcaaacaaatgtgtttgaatcccagtattccagagattcctggcggtgggctgtctagaagaggcgaggctggatctcacggtttttaaactgtatttttacccctttgggacccatacctgtgccctggagtctttcatgaggcacgtgggtcctctgcatcctcactctcccccctagcccaggtgcagccccgggaggggtgccctgaccccgccttaaacaaccaactttcccaccgaatcccatctggcgggggggggggggggtttgggtgccaagtgccctggaaacctattgtcttttggctcagccaaaagaaacattccctccttcctttccttccgggcttgggggaaccttcgtaaaaatcatagttagggttaagtccaagcagtgaggcctgacctgggctctgctctccttgttgagacactaacaggcagttgggaggaaaatctgcatttgactccaccctctttggggcaaaggagaaacaggtgacccgagggggggcaggccagaggagggcgactcgtgcacagggacccccacccttggaccccgctgtccttttctagttgtttacttggtggtggcagccagtctgaccttgtctgtggtctgactgttcctaagtgtgtaactttcagtattatctgtgacagatggttctgtggtgaaaaaggtttattatattccttatggctgccttgtacaaaatccgttagaaacgctaatgtaagatatcagatttctaacaagacaaaaacagcattatggagttaaaagatttttacaactgggtcttgattttgatgtgagctggtttttagctctcaaatgttgtcacttaaataaaaaccttctttgccttta

SEQ ID NO: 298 - DNA, 1310 bp, Homo sapien
  misc_feature (10)..(10): n=a,c,g or t
  misc_feature (20)..(20): n=a,c,g or t
tcagttgtcncccgggttanggatagtcgaccagccccgggggtgctgctgcctctccttgagtagttctgtgacccccaatccagctgttttgtagagaatccttctagcttctggtatgcctgctctccagcagctggaaacagatcttcctgcctgaccaaagctccttgtttcttgcgtggcatgtttgttcttcccgatccggtggctgtcgtagccgagggcctgcctgccaccttcctttatcatttgccctgttggggttcagggtgcatccttagcccaggacctgctcttccagcatcatgggttttttcctaaagatctcaacggctcccttgggctccataaaatatttcttttttaaaaaagcagactcctttcatgcattgggatgaacggccctcttgtctgggtgctgggctacagcaaacaaatgtgtttgaatcccagtattccagagattcctggcggtgggctgtctagaagaggcgaggctggatctcacggtttttaaactgtatttttacccctttgggacccatacctgtgccctggagtctttcatgaggcacgtgggtcctctgcatcctcactctcccccctagcccaggtgcagccccgggaggggtgccctgaccccgccttaaacaaccaactttcccaccgaatcccatctggcgggggggggggggggtttgggtgccaagtgccctggaaacctattgtcttttggctcagccaaaagaaacattccctccttcctttccttccgggcttgggggaaccttcgtaaaaatcatagttagggttaagtccaagcagtgaggcctgacctgggctctgctctccttgttgagacactaacaggcagttgggaggaaaatctgcatttgactccaccctctttggggcaaaggagaaacaggtgacccgagggggggcaggccagaggagggcgactcgtgcacagggacccccacccttggaccccgctgtccttttctagttgtttacttggtggtggcagccagtctgaccttgtctgtggtctgactgttcctaagtgtgtaactttcagtattatctgtgacagatggttctgtggtgaaaaaggtttattatattccttatggctgccttgtacaaaatccgttagaaacgctaatgtaagatatcagatttctaacaagacaaaaacagcattatggagttaaaagatttttacaactgggtcttgattttgatgtgagctggtttttagctctcaaatgttgtcacttaaataaaaaccttctttgccttta

SEQ ID NO: 299 - DNA, 1042 bp, Homo sapien
  misc_feature (744)..(794): n=a,c,g or t
atcatttatgaaatgatttaattaatttaaatggtaaaagtgaaatttctaggttttaaaagccaatagggtgggagtgttaaaaatgtagctagaacaatggatacttctggaatggggctccatttctaatcatttttgtcatcctggtatggaagaatgtgctctgctgtagttgctggtcagacaatgggtattagcaatttacattggtagtatacttaacacaacacagagtcacagaaaccacagaaaacagccaaactatcaacaagaatgcacactgcagattagaatttgccaagaggaatagagaattcccacataaatagcagtttattcactgctatttaggaagcagttgtattttctcttacagtgctattgtttcccctaccatatccaaatcatgtacaaattggaagagtctaaagtggcactttttgtatcacaccaaaggaccatatgcacataattttgagaaaaacaaaaaagttaccttgcaagaacaaaatacaactgaagaattttgttttaaaggggaacttcaaattattatttttgaaatttccaaaggatatggtatgtataataaatattaaaaactattttgatatgcagttctcttataactatatatttaaacaacagtcaagtaaaaagcaaatactaaaggttcgactctactgtccttgagcagtgctagaacacagctggagatggacacttcttgatgtcccctgnnnnnnnnnnnnnnnnnnnnnnnnnnnnnnnnnnnnnnnnnnnnnnnnnnncaattgagtgctacttgatactcgctattcttgttatcggccacttccacagccactagatgcttttgaactttttataatattttgctggtgttaattctcatacaaataccagtaggttacaatttgatttaagattaccagaactgttcatcttatatacagctgtctcatgttggaatattttttagagatacaaattaatgttgaactacaacaaagcactatttaaatgaacatttttttcc

SEQ ID NO: 300 - DNA, 561 bp, Homo sapien
atcatttatgaaatgatttaattaatttaaatggtaaaagtgaaatttctaggttttaaaagccaatagggtgggagtgttaaaaatgtagctagaacaatggatacttctggaatggggctccatttctaatcatttttgtcatcctggtatggaagaatgtgctctgctgtagttgctggtcagacaatgggtattagcaatttacattggtagtatacttaacacaacacagagtcacagaaaccacagaaaacagccaaactatcaacaagaatgcacactgcagattagaatttgccaagaggaatagagaattcccacataaatagcagtttattcactgctatttaggaagcagttgtattttctcttacagtgctattgtttcccctaccatatccaaatcatgtacaaattggaagagtctaaagtggcactttttgtatcacaccaaaggaccatatgcacataattttgagaaaaacaaaaaagttaccttgcaagaacaaaatacaactgaagaattttgttttaaaggggaacttcaaattattattt

SEQ ID NO: 301 - DNA, 277 bp, Homo sapien
tgtttattgtgaaatataattcatataatgtagaaagatatgaattgaaaagtacgtcttgcttctaagactctgcatttagaacagagaaaaatatttaatggccaaaaacttcacattggtctatgacataaaattacaaattcaaaaagctctgcaaatcgtgaacagggttaatatgaagaaaaaccacatctactagtcaaattgctgaaaaccgaagatagaaaagaaatctaaaaagcagccgagaagtacgcattaaataccagaaggg

SEQ ID NO: 302 - DNA, 633 bp, Homo sapien
ggctcatgcctgtaatcccagcactttgggtggcccaggagggcagatcacctgaggtcgggagttcaataccagcctgaccaacatggagaaaccccgtctctactaaaaatacaaaattagccgggcatggtgacgcacgggtgtaatcccagctgctgggtaagctgaggcagaagaatcgcttgaacctgggaggtgggggttgaggtgagctgagattgtaccattgcacttcagcctgggcaacaagagcggaactccatctctaaagaaataaatatgtttattgtgaaatataattcatataatgtagaaagatatgaattgaaaagtacgtcttgcttctaagactctgcatttagaacagagaaaaatatttaatggccaaaaacttcacattggtctatgacataaaattacaaattcaaaaagctctgcaaatcgtgaacagggttaatatgaagaaaaaccacatctactagtcaaattgctgaaaaccgaagatagaaaagaaatctaaaaagcagccagagaaatagcacattaaatacaagaaggagatcagccactggaatgacttttttctcaccagctgcaaagaaggtccaatatgagtataaaaaagaacat

SEQ ID NO: 303 - DNA, 582 bp, Homo sapien
tttgagttggagtctggctcttgtcacccaggctggagtacaatggcgcaatctcagctgactgcaacctccgcctcccgagttcaagcgattttcctgcctcaacctcccgagtactgaggcagaagaatcgcttgaacctgggaggtgggggttgaggtgagctgagattgtaccattgcacttcagcctgggcaacaagagcggaactccatctctaaagaaataaatatgtttattgtgaaatataattcatataatgtagaaagatatgaattgaaaagtacgtcttgcttctaagactctgcatttagaacagagaaaaatatttaatggccaaaaacttcacattggtctatgacataaaattacaaattcaaaaagctctgcaaatcgtgaacagggttaatatgaagaaaaaccacatctactagtcaaattgctgaaaaccgaagatagaaaagaaatctaaaaagcagccagagaaatagcacattaaatacaagaaggagatcagccactggaatgacttttttctcaccagctgcaaagaaggtccaatatgagtataaaaaagaacat

SEQ ID NO: 304 - DNA, 560 bp, Homo sapien
caaactgttttattctggatagctggacatagctcccctctgagattaacaggacgaaatatgaggcccacagcctttccagctcagaccattgcaatccctagttccttccgttccactctctcttaccccaggagtcaggaagttcttctgtgtctgaccctcacttcttcctgtggtaaagtgatttctgagattagaaacttcaaatcctcttgtgattagcatgagctgcatcccatttcaaagcccaccatgttgggcacttaataaatgttaaacatttcttatggggtatcacatcacctgcatctccccccattggctccctgccaacatgcacagatagtctcttctggattccactgttgaaggcaggaaaactgcccttcttttctttttcctcctcccccattgggacatatggtctctgttgagggcagagtgaggaacctcaacaggcgtcctgtggcttggggtcagcctaggctgttgcctctgaaccctgtgttgcactgcagcctgaggaagtttaggggtgcaggttaggaatagtggtg

SEQ ID NO: 305 - DNA, 876 bp, Homo sapien
  misc_feature (173)..(316): n=a,c,g or t
ttggggcagacattattatgttcatttacaaatgaggacacagaggctggaaaggcaaaaaaaacttgcaaatggctggaaagggagagagctgggatttgattctgggcagtctgactcttcatgaccccaggctctgaactgctttaactttatttttatttttaaaagtnnnnnnnnnnnnnnnnnnnnnnnnnnnnnnnnnnnnnnnnnnnnnnnnnnnnnnnnnnnnnnnnnnnnnnnnnnnnnnnnnnnnnnnnnnnnnnnnnnnnnnnnnnnnnnnnnnnnnnnnnnnnnnnnnnnnnnnnnnnnnnnncaaactgttttattctggatagctggacatagctcccctctgagattaacaggacgaaatatgaggcccacagcctttccagctcagaccattgcaatccctagttccttccgttccactctctcttaccccaggagtcaggaagttcttctgtgtctgaccctcacttcttcctgtggtaaagtgatttctgagattagaaacttcaaatcctcttgtgattagcatgagctgcatcccatttcaaagcccaccatgttgggcacttaataaatgttaaacatttcttatggggtatcacatcacctgcatctccccccattggctccctgccaacatgcacagatagtctcttctggattccactgttgaaggcaggaaaactgcccttcttttctttttcctcctcccccattgggacatatggtctctgttgagggcagagtgaggaacctcaacaggcgtcctgtggcttggggtcagcctaggctgttgcctctgaaccctgtgttgcactgcagcctgaggaagtttaggggtgcaggttaggaatagtggtg

SEQ ID NO: 306 - DNA, 480 bp, Homo sapien
caaactgttttattctggatagctggacatagctcccctctgagattaacaggacgaaatatgaggcccacagcctttccagctcagaccattgcaatccctagttccttccgttccactctctcttaccccaggagtcaggaagttcttctgtgtctgaccctcacttcttcctgtggtaaagtgatttctgagattagaaacttcaaatcctcttgtgattagcatgagctgcatcccatttcaaagcccaccatgttgggcacttaataaatgttaaacatttcttatggggtatcacatcacctgcatctccccccgttggctccctgccaacatgcacagatagtctcttctggattccactgttgaaggcaggaaaactgcccttcttttctttttcctcctcccccattgggacatatggtctctgttgagggcagagtgaggaacctcaacaggcgtcctgtggcttggggt

SEQ ID NO: 307 - DNA, 590 bp, Homo sapien
  misc_feature (523)..(524): n=a,c,g or t
  misc_feature (528)..(528): n=a,c,g or t
  misc_feature (585)..(585): n=a,c,g or t
acacgccttccgcggagcggaacaaaacggcgcgcaggccgggcgcacccagccgccacttccgagagcgcctgccgcccctgcgccgccgagccagctgccagaatgccgaactggggaggaggcaagaaatgtggggtgtgtcagaagacggtttactttgccgaagaggttcagtgcgaaggcaacagcttccataaatcctgcttcctgtgcatggtctgcaagaagaatctggacagtaccactgtggccgtgcatggtgaggagatttactgcaagtcctgctacggcaagaagtatgggcccaaaggctatggctacgggcagggcgcaggcaccctcagcactgacaagggggagtcgctgggtatcaagcacgaggaagcccctggccacaggcccaccaccaaccccaatgcatccaaatttgcccagaagattggtggctccgagcgctgcccccgatgcagccaggcagtctatgctgcggagaaggtgattggtgctgggaagtctggcnnaagnctgctttcgagtgccagtgtggcaagctggtcacactggcgacaggtggcggtttangcaag

SEQ ID NO: 308 - DNA, 2714 bp, Homo sapien
ttaggggtgcagaggaccaaaggagacacatatggattcctggaagaggaattggtgttggccagcatttctagagtcggatatgcagatcccatccctctgtcctcccacccattggccatcccgcctgcctccatttgtagacagttcctgaaagatcaggatattatgtatgcaaagaggccagagagcttcagctgtaagaagcttgcaatgagcaagaaggtcaccccagcttcaactcaatgcgtccgcttccccttcccctccacagtggtctgcaagaagaatctggacagtaccactgtggccgtgcatggtgaggagatttactgcaagtcctgctacggcaagaagtatgggcccaaaggctatggctacgggcagggcgcaggcaccctcagcactgacaagggggagtcgctgggtatcaagcacgaggagtgagtaaaagatcccctcccaacctttttcttgagctctctcccccaccctgtattaggcctcatgtgtatttacaaccatttttgggtaagcaatggaaggctcagaaaaccagttatttaaaaggcagtcacagagcagtgtctatgtgtcaggctgctgcaggagctggggatgcagcagggactaaaacaggctgggctcctccctgcaaggagcgtgcattctatatttgtatgagaagaagtcatttccctttcttcgaaatgccatagggtgtcatcagccccaccacacccccctcaccccacggcactccctggcctctgggtaaatggtggctgttggcagtcagcctggcttgctcctcggcctgcggggtggacggaaatgatggatgaattaccaagtttcagccaaggtcattgccccagtgggaatgattcatcagcagatttctcctgtaaagaatctgataatagaccagctgcaggaatgaggggcagaggagggcaattcttagcaaatggggtgttaaatgattctggggttaactgggtgaccgagggaagtatgatgttacaatggaaataacattgtgctgaggcttggtttgtccatctgtaaaatgggagatgaccctagaggccctagcctttgtgactttggcagagagaattgcgcgctgctctggcatgagatgaaggtagggtcatgccctctcagtgccagccccacctgtacttacagtgtaagtcacctcaccccatgcccttctccatgcagagcccctggccacaggcccaccaccaaccccaatgcatccaaatttgcccagaagattggtggctccgagcgctgcccccgatgcagccaggcagtctatgctgcggagaaggtgattggtgctgggaagtcctggcataaggcctgctttcgatgtgccaagtgtggcaaaggccttgagtcaaccaccctggcagacaaggatggcgagatttactgcaaaggatgttatgctaaaaacttcgggcccaagggctttggttttgggcaaggagctggggccttggtccactctgagtgaggccaccatcacccaccacaccctgcccactcctgcgcttttcatcgccattccattcccagcagctttggagacctccaggattatttctctgtcagccctgccacatatcactaatgacttgaacttgggcatctggctccctttggtttgggggtctgcctgaggtcccaccccactaaagggctccccaggcctgggatctgacaccatcaccagtaggagacctcagtgttttgggtctaggtgagagcaggcccctctccccacacctcgccccacagagctctgttcttagcctcctgtgctgcgtgtccatcatcagctgaccaagacacctgaggacacatcttggcacccagaggagcagcagcaacaggctggagggagagggaagcaagaccaagatgaggaggggggaaggctgggttttttggatctcagagattctcctctgtgggaaagaggttgagcttcctggtgtccctcagagtaagcctgaggagtcccagcttagggagtcactattggaggcagagaggcatgcaggcggggtcctaggagcccctgcttctccaggcctcttgcctttgagtctttgtggaatggatagcctcccactaggactgggaggagaataacccaggtcttaaggaccccaaagtcaggatgttgtttgatcttctcaaacatctagttccctgcttgatgggaggatcctaatgaaatacctgaaacatatattggcatttatcaatggctcaaatcttcatttatctctggccttaaccctggctcctgaggctgcggccagcagagcccaggccagggctctgttcttgccacacctgcttgatcctcagatgtggagggaggtaggcactgcctcagtcttcatccaaacacctttccctttgccctgagacctcagaatcttccctttaacccaagaccctgcctcttccactccacccttctccagggacccttagatcacatcactccacccctgccaggccccaggttaggaatagtggtgggaggaaggggaaagggctgggcctcaccgctcccagcaactgaaaggacaacactatctggagccacccactgaaagggctgcaggcatgggctgtacccaagctgatttctcatctggtcaataaagctgtttagaccagaa

SEQ ID NO: 309 - DNA, 1935 bp, Homo sapien
agagtcaatgttgtctagtatcactttggaaggagaataagtctatgaaatgcattaaactcagcagggaaagtcctaaggagtagtttctccaggggccacagaagaccctttgggtctctatgagaggccccaaggcaacacagggcagagaggtctttccggtgagggctgttcaagtactaagtgacagtaccaggaggagtgcaaagccctggctcacaccactgatctactggcaagatgggtctggagaaggctcatctggcccagccagtggggtaacagctactttggtgttaaacccaccccctcacctgccttttgtggtatagctggtgaccctaatcatcaggccattgcaacatagcatggaagatggtgcgaggtggcgtgtggtccctggccttctccctctactgccttgcaccataggccatgtcctcccagcagcaccagctgagtagacttcagaagtggcttgagcccttataccatggttatgtcaaagggagtgggcctggggtggagggtaccctcatcactggtggcagccattaactatttccttccctgcctagtcctggcataaggcctgctttcgatgtgccaagtgtggcaaaggccttgagtcaaccaccctggcagacaaggatggcgagatttactgcaaaggatgttatgctaaaaacttcgggcccaagggctttggttttgggcaaggagctggggccttggtccactctgagtgaggccaccatcacccaccacaccctgcccactcctgcgcttttcatcgccattccattcccagcagctttggagacctccaggattatttctctgtcagccctgccacatatcactaatgacttgaacttgggcatctggctccctttggtttgggggtctgcctgaggtcccaccccactaaagggctccccaggcctgggatctgacaccatcaccagtaggagacctcagtgttttgggtctaggtgagagcaggcccctctccccacacctcgccccacagagctctgttcttagcctcctgtgctgcgtgtccatcatcagctgaccaagacacctgaggacacatcttggcacccagaggagcagcagcaacaggctggagggagagggaagcaagaccaagatgaggaggggggaaggctgggttttttggatctcagagattctcctctgtgggaaagaggttgagcttcctggtgtccctcagagtaagcctgaggagtcccagcttagggagtcactattggaggcagagaggcatgcaggcggggtcctaggagcccctgcttctccaggcctcttgcctttgagtctttgtggaatggatagcctcccactaggactgggaggagaataacccaggtcttaaggaccccaaagtcaggatgttgtttgatcttctcaaacatctagttccctgcttgatgggaggatcctaatgaaatacctgaaacatatattggcatttatcaatggctcaaatcttcatttatctctggccttaaccctggctcctgaggctgcggccagcagagcccaggccagggctctgttcttgccacacctgcttgatcctcagatgtggagggaggtaggcactgcctcagtcttcatccaaacacctttccctttgccctgagacctcagaatcttccctttaacccaagaccctgcctcttccactccacccttctccagggacccttagatcacatcactccacccctgccaggccccaggttaggaatagtggtgggaggaaggggaaagggctgggcctcaccgctcccagcaactgaaaggacaacactatctggagccacccactgaaagggctgcaggcatgggctgtacccaagctgatttctcatctggtcaataaagctgtttagaccagaa

SEQ ID NO: 310 - DNA, 1470 bp, Homo sapien
ccacacgagttaccaatgacaaccctgcgccgccgagccagctgccagaatgccgaactggggaggaggcaagaaatgtggggtgtgtcagaagacggtttactttgccgaagaggttcagtgcgaaggcaacagcttccataaatcctgcttcctgtgcatggtctgcaagaagaatctggacagtaccactgtggccgtgcatggtgaggagatttactgcaagtcctgctacggcaagaagtatgggcccaaaggctatggctacgggcagggcgcaggcaccctcagcactgacaagggggagtcgctgggtatcaagcacgaggaagcccctggccacaggcccaccaccaaccccaatgcatccaaatttgcccagaagattggtggctccgagcgctgcccccgatgcagccaggcagtctatgctgcggagaaggtgattggtgctgggaaggtaaggtggctgctgggcatgagagggatggggggagatatcttcctgaaatgtggattccagaacttttaaattggtgacctagctctgctcagggcagcctgagcactggggtttaacctcttctctttgtccctgtgggttgcatgtacctgtgctttccagtctccaaggagctcatatcagccatgagcagtaacatccccagcattgatggacaatgggcaattcatagggagtggcaatgatcaatctgtatctctaatataggagaacagaaagtaagggtacgtggatgggctgcagagggtccacaaagccctgaagattatatacaaagtttcatgggaacctgtctgtttcttagaagaagatccatagcttttattaaattttcaaaggatttgtgatcccaaaaatatacattctgtttcatgggatgtggactcccaaaaacccatccaaatacccccagggcagagattttcaaggttcagacctaccagagcctcctaggaggcttttttcacactgtttagaattgccgcacatgcccttcccccatgatattctgacagtagcccccaatcaccaatgcacagtgagaatcactgtagcaaatcaacagttcccaattgagctgatcacttccttcagataggctgcagtagagaagaggcagaactcttgcccctggggtttgcagtgtcagattagcagtcagaaaatcacagaagagatgtctttcagctgtggggccagagaggatttctggagcatcacgtgaggcctgagatagaaaagtgacttggccaagatcacacaacaaggttatggaatgtctgggcctggagcccatcttcatctcttctggattcaggttttggctttcaaggctttttgaccttgaggaatgggataggggaattgatcaagaaatgttaaacaattaacacttaggccagtgttagaatctctactctcacagtcatggttggacagagatgggg

SEQ ID NO: 311 - DNA, 396 bp, Homo sapien
ccacacgagttaccaatgacaaccctgcgccgccgagccagctgccagaatgccgaactggggaggaggcaagaaatgtggggtgtgtcagaagacggtttactttgccgaagaggttcagtgcgaaggcaacagcttccataaatcctgcttcctgtgcatggtctgcaagaagaatctggacagtaccactgtggccgtgcatggtgaggagatttactgcaagtcctgctacggcaagaagtatgggcccaaaggctatggctacgggcagggcgcaggcaccctcagcatgaaaggacaacactatctggagccacccactgaaagggctgcaggcatgggctgtacccaagctgatttctcatctggtcaataaagctgtttagaccagaa

SEQ ID NO: 312 - DNA, 1638 bp, Homo sapien
cttatagactgtccataggtgccatttccaaccacttccaccagctcaaaaatcccagcaggatcccgcagggaggagaggtcgatgtccaccagactttttgcaggggagtcgttcgccattttccctttttgccaccaaaaaacaaataacaataaatgtctctgtcgctctgtgtatctcagccgcagaccaggccgccgagccagctgccagaatgccgaactggggaggaggcaagaaatgtggggtgtgtcagaagacggtttactttgccgaagaggttcagtgcgaaggcaacagcttccataaatcctgcttcctgtgcatggtctgcaagaagaatctggacagtaccactgtggccgtgcatggtgaggagatttactgcaagtcctgctacggcaagaagtatgggcccaaaggctatggctacgggcagggcgcaggcaccctcagcactgacaagggggagtcgctgggtatcaagcacgaggaagcccctggccacaggcccaccaccaaccccaatgcatccaaatttgcccagaagattggtggctccgagcgctgcccccgatgcagccaggcagtctatgctgcggagaaggtgattggtgctgggaaggtaaggtggctgctgggcatgagagggatggggggagatatcttcctgaaatgtggattccagaacttttaaattggtgacctagctctgctcagggcagcctgagcactggggtttaacctcttctctttgtccctgtgggttgcatgtacctgtgctttccagtctccaaggagctcatatcagccatgagcagtaacatccccagcattgatggacaatgggcaattcatagggagtggcaatgatcaatctgtatctctaatataggagaacagaaagtaagggtacgtggatgggctgcagagggtccacaaagccctgaagattatatacaaagtttcatgggaacctgtctgtttcttagaagaagatccatagcttttattaaattttcaaaggatttgtgatcccaaaaatatacattctgtttcatgggatgtggactcccaaaaacccatccaaatacccccagggcagagattttcaaggttcagacctaccagagcctcctaggaggcttttttcacactgtttagaattgccgcacatgcccttcccccatgatattctgacagtagcccccaatcaccaatgcacagtgagaatcactgtagcaaatcaacagttcccaattgagctgatcacttccttcagataggctgcagtagagaagaggcagaactcttgcccctggggtttgcagtgtcagattagcagtcagaaaatcacagaagagatgtctttcagctgtggggccagagaggatttctggagcatcacgtgaggcctgagatagaaaagtgacttggccaagatcacacaacaaggttatggaatgtctgggcctggagcccatcttcatctcttctggattcaggttttggctttcaaggctttttgaccttgaggaatgggataggggaattgatcaagaaatgttaaacaattaacacttaggccagtgttagaatctctactctcacagtcatggttggacagagatgggg

SEQ ID NO: 313 - DNA, 268 bp, Homo sapien
ctttgcttctcccaggcaccaaagctaagttgggaagacatggcacacagttccaggtcaggtgcagggggtcagctcttccctccatggcagctcaagagccccaggtcttagggtgccaccttttcaggtgtgggatctctaggccagactccctgggagtcactgctgaggcatgttggagcctcctggcccaggacacggtcggggaacggtgtgaggccaaagcaattgggtccacaggcagcacctgccatctgaggtatgg

SEQ ID NO: 314 - DNA, 268 bp, Homo sapien; identical to SEQ ID NO: 313

SEQ ID NO: 315 - DNA, 500 bp, Homo sapien
  misc_feature (473)..(473): n=a,c,g or t
atgtattgataactggaaatcataacataagccacaatttcgaatccttctctgtgttatttgtcatcttttgtgaatcccaactgattaagtcaaatcctggtcttcctatctttcacaattatcttcttgaaaactggcttttggcatctctaaagaattttatgtaacagattatttaaactagttagggaaaaacagattttcaaaatgaatttttgcttcatgatgtccttggaggtttaaaggagtcaataatatagaggtataatgtaaaaggaatttgaccatctgacacagcattgcttttataccattcctgtagcacttaacaggtctgatgccttataagaaggccacctgtttgtatgaaacaatgacaaaaaagtctggtacttgactttgctgaaggttattagaaatttactgccagaaactgctgactgcttccttaagtccatcttaactttcanggtcctgtctgggggagattgatgtga

SEQ ID NO: 316 - DNA, 499 bp, Homo sapien
atgtattgataactggaaatcataacataagccacaatttcgaatccttctctgtgttatttgtcatcttttgtgaatcccaactgattaagtcaaatcctggtcttcctatctttcacaattatcttcttgaaaactggcttttggcatctctaaagaattttatgtaacagattatttaaactagttagggaaaaacagattttcaaaatgaatttttgcttcatgatgtccttggaggtttaaaggagtcaataatatagaggtataatgtaaaaggaatttgaccatctgacacagcattgcttttataccattcctgtagcacttaacaggtctgatgcattataagaaggccacctgtttgtatgaaacaatgacaaaaaagtctggtacttgactttgctgaaggttattagaaatttactgccagaaactgctgactgcttccttaagtccatcttaacttcaaggtcctgtctgggggagattgatgtga

SEQ ID NO: 317 - DNA, 1258 bp, Homo sapien
gaaggtgggagatgaggtgggcatcgcgtcgatgctgagtctcggggagaaagctaggaaatgtccccagcaggtagggaaacgcttggcaaagcacaaaggcagagggacccacatagctgggcccattctgctcacgccctggcactactgcaagaactgtggttttccgggtcaaccctagcgaggagggagcacaagcagagcttctctgcggagaaggcagatttccagctcctaagaacaccctgttccacaaggaagctgacgtgcccctccccagggacccacgccaaaaggccattcttccaggccagcgtcccagggcgctgctgtgcgtggttcgcagccccggcaaacgatggcctgcactgcgtgctgtccgccctgttcctgctggactctctgcactgtgtcctgatcaccctctcagctgatagtgggcactgcagtgtgaatcttctcatggacaacagaccaatcctgcctccaccagtgccgtcgccaaatcagtaacacagagcaacctcaaacatttctgaatgtttaggtcatctaatacttggcaaaagagtgggccgaacacctccaccctcagctttctcttctgtttgtgtgtgagtgtgtgtagcagagtctgagaaagatacatacagccaccttccttttctgagcttgggaaaatttgaacaagagcactgaaatgcaaacactaatcaaaaaggaagtattttccattttaattctaaagagtggaaatagaaaaaaatgattttgctaaaacaaaatatgcagacacctttgggaaaacgtgctataaaggaaccatgctaactccagagatgacccagccggacagaggtgaaaggggtggacggacagcaaggttctagatgattccacacagttgggctgagaacactgtcaccgcacctcctctttgtgtttaaaattttgcattgaatgtaggtgcctctgaaatatgcgagctaaaaataggaagctcactcactgaccacaccaacagttgcccggtcacacgagaagatacactggcgaatacaaggatggcacagatgccctcactttgtgttaggcctccgaggagctgactttcaattttcaatatttcaaaacgtattctacttttgaatagcaatccttattctttccaagaaattcatagcataattctgggcactgagcaaagggtcacctgttcgggtttgtgtgctgttcacatttccagctgaaacct

SEQ ID NO: 318 - DNA, 1258 bp, Homo sapien
gaaggtgggagatgaggtgggcatcgcgtcgatgctgagtctcggggagaaagctaggaaatgtccccagcaggtagggaaacgcttggcaaagcacaaaggcagagggacccacatagctgggcccattctgctcacgccctggcactactgcaagaactgtggttttccgggtcaaccctagcgaggagggagcacaagcagagcttctctgcggagaaggcagatttccagctcctaagaacaccctgttccacaaggaagctgacgtgcccctccccagggacccacgccaaaaggccattcttccaggccagcgtcccagggcgctgctgtgcgtggttcgcagccccggcaaacgatggcctgcactgcgtgctgtccgccctgttcctgctggactctctgcactgtgtcctgatcaccctctcagctgatagtgggcactgcagtgtgaatcttctcatggacaacagaccaatcctgcctccaccagtgccgtcgccaaatcagtaacacagagcaacctcaaacatttctgaatgtttaggtcatctaatacttggcaaaagagtgggccgaacacctccaccctcagctttctcttctgtttgtgtgtgagtgtgtgtagcagagtctgagaaagatacatacagccaccttccttttctgagcttgggaaaatttgaacaagagcactgaaatgcaaacactaatcaaaaaggaagtattttccattttaattctaaagagtggaaatagaaaaaaatgattttgctaaaacaaaatatgcagacacctttgggaaaacgtgctataaaggaaccatgctaactccagagatgacccagccggacagaggtgaaaggggtggacggacagcaaggttctagatgattccacacagttgggctgagaacactgtcaccgcacctcctctttgtgtttaaaattttgcattgaatgtaggtgcctctgaaatatgcgagctaaaaataggaagctcactcactkaccacaccaacagttgcccggtcacacgagaagatacactggcgaatacaaggatggcacagatgccctcactttgtgttaggcctccgaggagctgactttcaattttcaatatttcaaaacgtattctacttttgaatagcaatccttattctttccaagaaattcatagcataattctgggcactgagcaaagggtcacctgttcgggtttgtgtgctgttcacatttccagctgaaacct

SEQ ID NO: 319 - DNA, 1126 bp, Homo sapien
ggcgcagtgtgctgccaaagcgatgctttatgccccagcccagcagcagctgatttccacccgctcacctgcaccactgagggggaactcgtcttcagtctcctgccctgcctgcaatcccttcatctttcataggagctttattttttaggtggggcttgtgaaaaagagcttgccagtgcctataaacttcttcatgtgagagtttccagtctttcttaactgatatgataacccacattcagcctttaagaattattttaacatttgagcagatttctttcttatctgagtctatggcaccagccacttcctcccatgttccatcaaaggtaaggagtttgtttgtccgtcttcgctcctcagaggagctgaccctttggaattctgcccattttgttgctttcaaatctcaggtcccggtgggctcaagaaaagcaatcattttgtgcatgatctggcttctatcttattgttgaggtggaaacaatggtaatatgggtgtgtgtatttctaccttctaggtagaaattgaacaaaagcattctttgctattatacctgggttgttcttcactgttccctgggaatctgttacggaaattatgctgagctaataattctgatgggatgatcttcactcatgcagactgtggcgtcatgtagaaggaaggctaatatggatgtgaggttcaagatcaagatgggcaactgatggtcagactccagtggttcttcaaaactttctaggaggtaaacaagatgaaagggaaagcacacaaatttgctggaatttggaaaacacgaaccctggaatttggaggagtcacttccactggaaaatacttttatattatttatagtggctaccattaccgtgctcactttacaggtgaggttcagagatttatgtaacatgccaaaaggtcacacagctggacacagcagaaccaagattcaaatctgcacaggtaagctccacagccttctgtcttatctaggactttcctaaccaccttgaatatttcattttaaaattgataccttattggcttataatctctgccaacagttttgctaaaaccctttcctacactatacaaccattccatttgtttagaaattca

SEQ ID NO: 320 - DNA, 1517 bp, Homo sapien
ggcgcagtgtgctgccaaagcgatgctttatgccccagcccagcagcagctgatttccacccgctcacctgcaccactgagggggaactcgtcttcagtctcctgccctgcctgcaatcccttcatctttcataggagctttattttttaggtggggcttgtgaaaaagagcttgccagtgcctataaacttcttcatgtgagagtttccagtctttcttaactgatatgataacccacattcagcctttaagaattattttaacatttgagcagatttctttcttatctgagtctatggcaccagccacttcctcccatgttccatcaaaggtaaggagtttgtttgtccgtcttcgctcctcagaggagctgaccctttggaattctgcccattttgttgctttcaaatctcaggtcccggtgggctcaagaaaagcaatcattttgtgcatgatctggcttctatcttattgttgaggtggaaacaatggtaatatgggtgtgtgtatttctaccttctaggtagaaattgaacaaaagcattctttgctattatacctgggttgttcttcactgttccctgggaatctgttacggaaattatgctgagctaataattctgatgggatgatcttcactcatgcagactgtggcgtcatgtagaaggaaggctaatatggatgtgaggttcaagatcaagatgggcaactgatggtcagactccagtggttcttcaaaactttctaggaggtaaacaagatgaaagggaaagcacacaaatttgctggaatttggaaaacacgaaccctggaatttggaggagtcacttccactggaaaatacttttatattatttatagtggctaccattaccgtgctcactttacaggtgaggttcagagatttatgtaacatgccaaaaggtcacacagctggacacagcagaaccaagattcaaatctgcacaggtaagctccacagccttctgtcttatctaggactttcctaaccaccttgaatatttcattttaaaattgataccttattggcttataatctctgccaacagttttgctaaaaccctttcctacactatacaaccattccatttgtttagaaattcatcagaggagaaatattaagtggctttctttgtgacaccatcagaaatacagcttcccaaatctttcaactgaagaagtaaccaaaaagatatctgaaggacagagagatggagaaaaggagaggagatagaaaaaggaagagagagagaaagctcaaaataaattagtatatatgctagcaagattcctcccagtagttgtctttttccaattagaagtgacttgcacagttgcagtaccacctctgttaaccccggctcactgcccttccaaaccatgtcttctgttactctcaatctatgtcgaatagtccctcagctctcataatgggaccacaattcatggctgcttcctgatacagctgtgtcctgttacaaggcttgaagttaca

SEQ ID NO: 321 - DNA, 1118 bp, Homo sapien
ggcctgggcagtgggcgaggctttatgccccaccccagcagcagctgatttccacccgctcacctgcaccactgagggggaactctcttcagtctcctgccctgcctgcaatcccttcatctttcataggagctttattttttaggtggggcttgtgaaaaagagcttgccagtgcctataaacttcttcatgtgagagtttccagtctttcttaactgatatgataacccacattcagcctttaagaattattttaacatttgagcagatttctttcttatctgagtctatggcaccagccacttcctcccatgttccatcaaaggtaaggagtttgtttgtccgtcttcgctcctcagaggagctgaccctttggaattctgcccattttgttgctttcaaatctcaggtcccggtgggctcaagaaaagcaatcattttgtgcatgatctggcttctatcttattgttgaggtggaaacaatggtaatatgggtgtgtgtatttctaccttctaggtagaaattgaacaaaagcattctttgctattatacctgggttgttcttcactgttccctgggaatctgttacggaaattatgctgagctaataattctgatgggatgatcttcactcatgcagactgtggcgtcatgtagaaggaaggctaatatggatgtgaggttcaagatcaagatgggcaactgatggtcagactccagtggttcttcaaaactttctaggaggtaaacaagatgaaagggaaagcacacaaatttgctggaatttggaaaacacgaaccctggaatttggaggagtcacttccactggaaaatacttttatattatttatagtggctaccattaccgtgctcactttacaggtgaggttcagagatttatgtaacatgccaaaggtcacacagctggacacagcagaaccaagattcaaatctgcacaggtaagctccacagccttctgtcttatctaggactttcctaaccaccttgaatatttcattttaaaattgataccttattggcttataatctctgccaacattttgctaaaaccctttcctacactatacaaccattccatttgtttagaaattca

SEQ ID NO: 322 - DNA, 1323 bp, Homo sapien
ggcctgggcagtgggcgaggctttatgccccaccccagcagcagctgatttccacccgctcacctgcaccactgagggggaactctcttcagtctcctgccctgcctgcaatcccttcatctttcataggagctttattttttaggtggggcttgtgaaaaagagcttgccagtgcctataaacttcttcatgtgagagtttccagtctttcttaactgatatgataacccacattcagcctttaagaattattttaacatttgagcagatttctttcttatctgagtctatggcaccagccacttcctcccatgttccatcaaaggtaaggagtttgtttgtccgtcttcgctcctcagaggagctgaccctttggaattctgcccattttgttgctttcaaatctcaggtcccggtgggctcaagaaaagcaatcattttgtgcatgatctggcttctatcttattgttgaggtggaaacaatggtaatatgggtgtgtgtatttctaccttctaggtagaaattgaacaaaagcattctttgctattatacctgggttgttcttcactgttccctgggaatctgttacggaaattatgctgagctaataattctgatgggatgatcttcactcatgcagactgtggcgtcatgtagaaggaaggctaatatggatgtgaggttcaagatcaaggtaaattcttcatcttactggtgcttataagaagatggtatgtttctttctcttttaaactaaaaagaaggtctaccaacgtgtgaagtcgcaaaatatggcatgcctattgttaattttaattgagatgcagaagactgtcactactgggatattcccatttaactacttagaataaagctcctcccaaattttggagccagaaggatgttgttacatttgcatttcagattaagtcagtgaagtgggtggtgggttggactggtcccagcttagggacttgaataaagttctagaataatttgactaaatgtacatagatatccaaagttgccgctacacctgagagtactatcaagggtttttacagcagcatggtgacggttttcccacaactaaggcattgtaaagtacaatgtaggtttgtttagaaacattttcaagtttccacaacatatatgcaatgatcatatgccatgaagcaccattaaacattaacatttttggaaaatttactgtaagagaggtattaaattaatggactatacatatttcacaaagattaataattattatattattagtggtcatattaaactaatataactaataacataagctaataat

SEQ ID NO: 323 - DNA, 2422 bp, Homo sapien
atgttcttttttatactcatattggaccttctttgcagctggtgagaaaaaagtcattccagtggctgatctccttctggtatttaatgcgtacttctcggctgctttttagatttcttttctatcttcggttttcagcaatttgactagtagatgtggtttttcttcatattaaccctgttcacgatttgcagagctttttgaatttgtaattttatgtcatagaccaatgcgaagtttttggccattaaatatttttctctgttctaaatgcagagtcttagaagcaagacgtacttttcaattcatatctttctacattatatgaattatatttcacaataaacatatttatttctttagagatggagttccgctcttgttgcccaggctgaagtgcaatggtacaatctcagctcacctcaacccccacctcccaggttcaagcgattcttctgcctcagcttacccagcagctggggattacacccgtgcgtcaccatgcccgggctaattttgtatttttagtagagacggggtttctccatgttggtcaggctggtctcgaactcctgagctcaagcagtccgcccaccttgacctcccaaagtgctgggattacaggctttcatagaaaccatgttcaccagtaaagcccctgtggaagaagcctttctttatgctaagtttgaatttgaatgccgggctcgtggcgcagacattttagcctatccacctgtggtggctggtggtaatcggtcaaacactttgcactatgtgaaaaataatcaactcatcaaggatggggaaatggtgcttctggatggaggttgtgagtcttcctgctatgtgagtgacatcacacgtacgtggccagtcaatggcaggttcaccgcacctcaggcagaactctatgaagccgttctagagatccaaagagattgtttggccctctgcttccctgggacaagcttggagaacatctacagcatgatgctgaccctgataggacagaagcttaaagacttggggatcatgaagaacattaaggaaaataatgccttcaaggctgctcgaaaatactgtcctcatcatgttggccactacctcgggatggatgtccatgacactccagacatgccccgttccctccctctgcagcctgggatggtaatcacaattgagcccggcatttatattccagaggatgacaaagatgccccagagaagtttcggggtcttggtgtacgaattgaggatgatgtagtggtgactcaggactcacctctcatcctttctgcagactgtcccaaagagatgaatgacattgaacagatatgcagccaggcttcttgaccttcactgcggcccacatgcacctcaggttcaaaatgggtgtcttctggcagccctgcacgtgtgctttctgagtgtctctgtgtgtgcattaatatatgcattccatttgggagcatagcagctgtgtgaatgtatgtaattgtgtgtggggggttttttgttttaagtagttagaagtctgggaaaatgaatttttgaatagtatgttactgcagctttggtaacattaattctatagaattaatgatcagagcaagtttaatttttaaacataaaggtcttggttacacatgtccatgcattccagttaacacatttaaacatatagaaaattcacttcttctttcaagtccttccctttctatacttttgctgagatcaacccaatatcataagaagtttgtgtgatgcctgtatttttagctaattaccaaggtctctgcctatgcaaaaattcatctttcggtgattgtgggcggccaatacataccttctgtaactcctccctacctattctagatcctgcatatctactggagccatatgagccctcaggggcactggtgtcctgcagtcttactagtcagccacagtccaggttccagcaacactagctacctaccaaacaaaacacttctgagcttttcttgccatttggttgcctgggacctggaaagtgtttagattcttgataaagatggaaatggaagagaaagaaaattatatatgtatatactaaagatccagacatcagggctgggcacagcggttccgcctgtagtcccagcactttgggaggtccaggcgggtggatctcttgagaccaggaggtcgagaccagcctggccggcgtggtggagcactgtctctactaaaaatgcaaaaatgagctgggtgtgatgatacatgcctgtggtcctggctacttgggaggctgaggcatgagaattgcttgaacctgggaggtggaggttgcagtgagctgagctcatgcgactgcactccagcctgggtgactgagcgagactctgcctcataaatacaaataaataaatacacctcc

SEQ ID NO: 324 - DNA, 4223 bp, Homo sapien
ggctggcccggtttcctggcgacgcggccctgcaggcggttgcgttccccgtcgttaccctctttctcttcccgacgcgtgagttaggccgtaatgccttggctgctctcagcccccaagctggttcccgctgtagcaaacgtccgcggcctctcaggagcttcctggacgatttaacaggtcctcaagcgagtcttcaaagaagtgaaaagaaaatggatccctttcatgaaaaatttctttaaaaacatcatctggcttatggaatgtgaagccgtactcacattcatcatcaaaatgacttccacctccgtttaatccttctgtgccatatttatcataaatgtcccgtttctcatcatttgataatacctcgtatgcctcagctacttctttgaattttctctctgcttcttctttattttctggatttttatcagggtgccatttaagtgccactttatgataagcttttttaatgtcctcaggtgaagcatatctttgcagtcctagaacttcatagtaatccaccatgttttaacagatagttggaagtgggtgtgctgggtattgagaaccgtggtttcctcagctcaggctctgctggtggtggtgatagaggtagtgactgcaaataggtacacttttatgttaaagacaatgttattaccatgtgctaagagatgaggatactgattatgtggcaagcagagttacaaatatgtcagagagggctgcattatggtgtcattctggggtcagtgtagggactggaccttccaaatagagctagtccagagtcgtaccagaccatcctgaatcctctggactgtttcccctgtatgtttccctggaagcttcaggcagtgcctcataagccaatggaatctgttgctaatagccacagcatatcccttgcataatatgacctctagattactgcgccttaattgcttcccagctcttctatgctttggtttagaaaaatgaagtactgacttacgggtgaagaaagtattcaaacagttgacatatttatttcagtcaagaaacagttcagagggagatacaaacaagtaacttagttacaatataatagttatgatgagaggaagtactggatgctaaacaattatatgagagacagctcaggctgggggtgtcaatgaaagcctcttggaggaagtagcctgatatgttaactttctgcatgccagtggatgtatgttgtgttcacagcgaaggtactcccttcagcctgtcccagaaaggaggattccaaaccgatacttaggccagcccagcccctttacacacccacacctcctcagaccaggggaggtaactccaggactatctcaggtggaatatgcacttcgcagacacaaactaatgtctctgatccagaaggaagctcaagggcagagtgggacagaccagacagtggttgtgctctccaaccctacatactacatgagcaacgatattccctatactttccaccaagacaacaatttcctgtacctatgtggattccaagagcctgatagcattcttgtccttcagagcctccctggcaaacaattaccatcacacaaagccatactttttgtgcctcggcgagatcccagtcgagaactttgggatggtccgcgatctggcactgatggagcaatagctctaactggagtagacgaagcctatacgctagaagaatttcaacatcttctaccaaaaatgaaagctgagacgaacatggtttggtatgactggatgaggccctcacatgcacagcttcactctgactatatgcagcccctgactgaggccaaagccaagagcaagaacaaggttcggggtgttcagcagctgatacagcgcctccggctgatcaagtctcctgcagaaattgaacgaatgcagattgctgggaagctgacatcacagagacagggtttctcagtgttgtccaggctggtctcgaactcctgagctcaagcagtccgcccaccttgacctcccaaagtgctgggattacaggctttcatagaaaccatgttcaccagtaaagcccctgtggaagaagcctttctttatgctaagtttgaatttgaatgccgggctcgtggcgcagacattttagcctatccacctgtggtggctggtggtaatcggtcaaacactttgcactatgtgaaaaataatcaactcatcaaggatggggaaatggtgcttctggatggaggttgtgagtcttcctgctatgtgagtgacatcacacgtacgtggccagtcaatggcaggttcaccgcacctcaggcagaactctatgaagccgttctagagatccaaagagattgtttggccctctgcttccctgggacaagcttggagaacatctacagcatgatgctgaccctgataggacagaagcttaaagacttggggatcatgaagaacattaaggaaaataatgccttcaaggctgctcgaaaatactgtcctcatcatgttggccactacctcgggatggatgtccatgacactccagacatgccccgttccctccctctgcagcctgggatggtaatcacaattgagcccggcatttatattccagaggatgacaaagatgccccagagaagtttcggggtcttggtgtacgaattgaggatgatgtagtggtgactcaggactcacctctcatcctttctgcagactgtcccaaagagatgaatgacattgaacagatatgcagccaggcttcttgaccttcactgcggcccacatgcacctcaggttcaaaatgggtgtcttctggcagccctgcacgtgtgctttctgagtgtctctgtgtgtgcattaatatatgcattccatttgggagcatagcagctgtgtgaatgtatgtaattgtgtgtggggggttttttgttttaagtagttagaagtctgggaaaatgaatttttgaatagtatgttactgcagctttggtaacattaattctatagaattaatgatcagagcaagtttaatttttaaacataaaggtcttggttacacatgtccatgcattccagttaacacatttaaacatatagaaaattcacttcttctttcaagtccttccctttctatacttttgctgagatcaacccaatatcataagaagtttgtgtgatgcctgtatttttagctaattaccaaggtctctgcctatgcaaaaattcatctttcggtgattgtgggcggccaatacataccttctgtaactcctccctacctattctagatcctgcatatctactggagccatatgagccctcaggggcactggtgtcctgcagtcttactagtcagccacagtccaggttccagcaacactagctacctaccaaacaaaacacttctgagcttttcttgccatttggttgcctgggacctggaaagtgtttagattcttgataaagatggaaatggaagagaaagaaaattatatatgtatatactaaagatccagacatcagggctgggcacagcggttccgcctgtaatcccagcactttgggaggtccaggcaggtggatctcttgagaccaggaggtcaagaccagcctggccaacgtggtgaaacactgtctctactaaaaatacaaaaatgagctgggtgtgatgatacatgcctgtggtcctggctacttgggaggctgaggcatgagaattgcttgaacctgggaggtggaggttgcagtgagctgagctcatgcgactgcactccagcctgggtgactgagcaagactctgcctcaaaaaaacaaataaataaataaaatcctgacatcctgccatcttttctcttcaatttaaagttgatttcttaatgatgacttcaaaaattaataaaaagaaaagaaaaaaatgatttctggccgggcgtggtggctcaagcctgtaatcccagcactttgggaggccgaggtgggcggatcacgaggtcaggagattgagacctcctggctaacacggtgaaaccccgtctttactaaaaatacaaaaaaaattagctgggcgtggtggcggatgcctgtagtcccagctactcaggaggctgaggcaggagaatggcgtgaacccagaaggcagagcttgcagtgagccaagatcgcgccactgcactccagcctgggtgacagagcgagactccgtctcaaaaaaaaaaaa

SEQ ID NO: 325 - DNA, 3306 bp, Homo sapien
ggctggcccggtttcctggcgacgcggccctgcaggcggttgcgttccccgtcgttaccctctttctcttcccgacgcgtgagttaggccgtaatgccttggctgctctcagcccccaagctggttcccgctgtagcaaacgtccgcggcctctcagaagacactatgtgtgcatgagtacgtgtgcacgagcgtgcatgtggagaaggtgcaggaggagagaaagagaaatcaccaatgcaacagcagcctactccaccagtgggttagtgctgctggagggagatgaaaagattaggaaggatgtatgttgtgttcacagcgaaggtactcccttcagcctgtcccagaaaggaggattccaaaccgatacttaggccagcccagcccctttacacacccacacctcctcagaccaggggaggtaactccaggactatctcaggtggaatatgcacttcgcagacacaaactaatgtctctgatccagaaggaagctcaagggcagagtgggacagaccagacagtggttgtgctctccaaccctacatactacatgagcaacgatattccctatactttccaccaagacaacaatttcctgtacctatgtggattccaagagcctgatagcattcttgtccttcagagcctccctggcaaacaattaccatcacacaaagccatactttttgtgcctcggcgagatcccagtcgagaactttgggatggtccgcgatctggcactgatggagcaatagctctaactggagtagacgaagcctatacgctagaagaatttcaacatcttctaccaaaaatgaaagctgagacgaacatggtttggtatgactggatgaggccctcacatgcacagcttcactctgactatatgcagcccctgactgaggccaaagccaagagcaagaacaaggttcggggtgttcagcagctgatacagcgcctccggctgatcaagtctcctgcagaaattgaacgaatgcagattgctgggaagctgacatcacagagacagggtttctcagtgttgtccaggctggtctcgaactcctgagctcaagcagtccgcccaccttgacctcccaaagtgctgggattacaggctttcatagaaaccatgttcaccagtaaagcccctgtggaagaagcctttctttatgctaagtttgaatttgaatgccgggctcgtggcgcagacattttagcctatccacctgtggtggctggtggtaatcggtcaaacactttgcactatgtgaaaaataatcaactcatcaaggatggggaaatggtgcttctggatggaggttgtgagtcttcctgctatgtgagtgacatcacacgtacgtggccagtcaatggcaggttcaccgcacctcaggcagaactctatgaagccgttctagagatccaaagagattgtttggccctctgcttccctgggacaagcttggagaacatctacagcatgatgctgaccctgataggacagaagcttaaagacttggggatcatgaagaacattaaggaaaataatgccttcaaggctgctcgaaaatactgtcctcatcatgttggccactacctcgggatggatgtccatgacactccagacatgccccgttccctccctctgcagcctgggatggtaatcacaattgagcccggcatttatattccagaggatgacaaagatgccccagagaagtttcggggtcttggtgtacgaattgaggatgatgtagtggtgactcaggactcacctctcatcctttctgcagactgtcccaaagagatgaatgacattgaacagatatgcagccaggcttcttgaccttcactgcggcccacatgcacctcaggttcaaaatgggtgtcttctggcagccctgcacgtgtgctttctgagtgtctctgtgtgtgcattaatatatgcattccatttgggagcatagcagctgtgtgaatgtatgtaattgtgtgtggggggttttttgttttaagtagttagaagtctgggaaaatgaatttttgaatagtatgttactgcagctttggtaacattaattctatagaattaatgatcagagcaagtttaatttttaaacataaaggtcttggttacacatgtccatgcattccagttaacacatttaaacatatagaaaattcacttcttctttcaagtccttccctttctatacttttgctgagatcaacccaatatcataagaagtttgtgtgatgcctgtatttttagctaattaccaaggtctctgcctatgcaaaaattcatctttcggtgattgtgggcggccaatacataccttctgtaactcctccctacctattctagatcctgcatatctactggagccatatgagccctcaggggcactggtgtcctgcagtcttactagtcagccacagtccaggttccagcaacactagctacctaccaaacaaaacacttctgagcttttcttgccatttggttgcctgggacctggaaagtgtttagattcttgataaagatggaaatggaagagaaagaaaattatatatgtatatactaaagatccagacatcagggctgggcacagcggttccgcctgtaatcccagcactttgggaggtccaggcaggtggatctcttgagaccaggaggtcaagaccagcctggccaacgtggtgaaacactgtctctactaaaaatacaaaaatgagctgggtgtgatgatacatgcctgtggtcctggctacttgggaggctgaggcatgagaattgcttgaacctgggaggtggaggttgcagtgagctgagctcatgcgactgcactccagcctgggtgactgagcaagactctgcctcaaaaaaacaaataaataaataaaatcctgacatcctgccatcttttctcttcaatttaaagttgatttcttaatgatgacttcaaaaattaataaaaagaaaagaaaaaaatgatttctggccgggcgtggtggctcaagcctgtaatcccagcactttgggaggccgaggtgggcggatcacgaggtcaggagattgagacctcctggctaacacggtgaaaccccgtctttactaaaaatacaaaaaaaattagctgggcgtggtggcggatgcctgtagtcccagctactcaggaggctgaggcaggagaatggcgtgaacccagaaggcagagcttgcagtgagccaagatcgcgccactgcactccagcctgggtgacagagcgagactccgtctcaaaaaaaaaaaa

SEQ ID NO: 326 - DNA, 1426 bp, Homo sapien
ggctggcccggtttcctggcgacgcggccctgcaggcggttgcgttccccgtcgttaccctctttctcttcccgacgcgtgagttaggccgtaatgccttggctgctctcagcccccaagctggttcccgctgtagcaaacgtccgcggcctctcagggtcttactttgtcacccaagctggagtgcagtggcgtgatcccattacactgcaacctatgtcttccaggctcaagcagtctttctaccagcttcccgagtagctgggactacaggagcttcctggacgatttaacaggtcctcaagcgagtcttcaaagaagtgaaaagaaaatggatccctttcatgaaaaatttctttaaaaacatcatctggcttatggaatgtgaagccgtactcacattcatcatcaaaatgacttccacctccgtttaatccttctgtgccatatttatcataaatgtcccgtttctcatcatttgataatacctcgtatgcctcagctacttctttgaattttctctctgcttcttctttattttctggatttttatcagggtgccatttaagtgccactttatgataagcttttttaatgtcctcaggtgaagcatatctttgcagtcctagaacttcatagtaatccaccatgttttaacagatagttggaagtgggtgtgctgggtattgagaaccgtggtttcctcagctcaggctctgctggtggtggtgatagaggtagtgactgcaaataggtacacttttatgttaaagacaatgttattaccatgtgctaagagatgaggatactgattatgtggcaagcagagttacaaatatgtcagagagggctgcattatggtgtcattctggggtcagtgtagggactggaccttccaaatagagctagtccagagtcgtaccagaccatcctgaatcctctggactgtttcccctgtatgtttccctggaagcttcaggcagtgcctcataagccaatggaatctgttgctaatagccacagcatatcccttgcataatatgacctctagattactgcgccttaattgcttcccagctcttctatgctttggtttagaaaaatgaagtactgacttacgggtgaagaaagtattcaaacagttgacatatttatttcagtcaagaaacagttcagagggagatacaaacaagtaacttagttacaatataatagttatgatgagaggaagtactggatgctaaacaattatatgagagacagctcaggctgggggtgtcaatgaaagcctcttggaggaagtagcctgatatgttaactttctgcatgccagtggtaagtcatttgagattatagtatctttgtccacccaaggtttactgctgtaaaacatgtaattaaagatttggaaagttgtgtgtttatg

SEQ ID NO: 327 - DNA, 528 bp, Homo sapien
ctttagtcccgtatcatcctttataaagaacactgaagtttaggggcagaaaagctgtatattcagtcttagaatatcttgccatttccagggaatgacctttctaatgatttataatcaaacctttattgcttcagtcctgagagagtcttaagtctcaacactttagagttccacgttacaggttttatagttttgactcttgttcaagtcgttatgacagttgatatttcttgttgctggtagttttgttttaaatttatttttcggcttctcattctaagctgagacgaacatggtttggtatgactggatgaggccctcacatgcacagcttcactctgactatatgcagcccctgactgaggccaaagccaagagcaagaacaaggttcggggtgttcagcagctgatacagcgcctccggctgatcaagtctcctgcagaaattgaacgaatgcagattgctgggaagctgacatcacaggtatgattcctattgaaaagttttttccagccgggcgcggt

SEQ ID NO: 328 - DNA, 4339 bp, Homo sapien
ggctggcccggtttcctggcgacgcggccctgcaggcggttgcgttccccgtcgttaccctctttctcttcccgacgcgtgagttaggccgtaatgccttggctgctctcagcccccaagctggttcccgctgtagcaaacgtccgcggcctctcagggtcttactttgtcacccaagctggagtgcagtggcgtgatcccattacactgcaacctatgtcttccaggctcaagcagtctttctaccagcttcccgagtagctgggactacaggagcttcctggacgatttaacaggtcctcaagcgagtcttcaaagaagtgaaaagaaaatggatccctttcatgaaaaatttctttaaaaacatcatctggcttatggaatgtgaagccgtactcacattcatcatcaaaatgacttccacctccgtttaatccttctgtgccatatttatcataaatgtcccgtttctcatcatttgataatacctcgtatgcctcagctacttctttgaattttctctctgcttcttctttattttctggatttttatcagggtgccatttaagtgccactttatgataagcttttttaatgtcctcaggtgaagcatatctttgcagtcctagaacttcatagtaatccaccatgttttaacagatagttggaagtgggtgtgctgggtattgagaaccgtggtttcctcagctcaggctctgctggtggtggtgatagaggtagtgactgcaaataggtacacttttatgttaaagacaatgttattaccatgtgctaagagatgaggatactgattatgtggcaagcagagttacaaatatgtcagagagggctgcattatggtgtcattctggggtcagtgtagggactggaccttccaaatagagctagtccagagtcgtaccagaccatcctgaatcctctggactgtttcccctgtatgtttccctggaagcttcaggcagtgcctcataagccaatggaatctgttgctaatagccacagcatatcccttgcataatatgacctctagattactgcgccttaattgcttcccagctcttctatgctttggtttagaaaaatgaagtactgacttacgggtgaagaaagtattcaaacagttgacatatttatttcagtcaagaaacagttcagagggagatacaaacaagtaacttagttacaatataatagttatgatgagaggaagtactggatgctaaacaattatatgagagacagctcaggctgggggtgtcaatgaaagcctcttggaggaagtagcctgatatgttaactttctgcatgccagtggatgtatgttgtgttcacagcgaaggtactcccttcagcctgtcccagaaaggaggattccaaaccgatacttaggccagcccagcccctttacacacccacacctcctcagaccaggggaggtaactccaggactatctcaggtggaatatgcacttcgcagacacaaactaatgtctctgatccagaaggaagctcaagggcagagtgggacagaccagacagtggttgtgctctccaaccctacatactacatgagcaacgatattccctatactttccaccaagacaacaatttcctgtacctatgtggattccaagagcctgatagcattcttgtccttcagagcctccctggcaaacaattaccatcacacaaagccatactttttgtgcctcggcgagatcccagtcgagaactttgggatggtccgcgatctggcactgatggagcaatagctctaactggagtagacgaagcctatacgctagaagaatttcaacatcttctaccaaaaatgaaagctgagacgaacatggtttggtatgactggatgaggccctcacatgcacagcttcactctgactatatgcagcccctgactgaggccaaagccaagagcaagaacaaggttcggggtgttcagcagctgatacagcgcctccggctgatcaagtctcctgcagaaattgaacgaatgcagattgctgggaagctgacatcacagagacagggtttctcagtgttgtccaggctggtctcgaactcctgagctcaagcagtccgcccaccttgacctcccaaagtgctgggattacaggctttcatagaaaccatgttcaccagtaaagcccctgtggaagaagcctttctttatgctaagtttgaatttgaatgccgggctcgtggcgcagacattttagcctatccacctgtggtggctggtggtaatcggtcaaacactttgcactatgtgaaaaataatcaactcatcaaggatggggaaatggtgcttctggatggaggttgtgagtcttcctgctatgtgagtgacatcacacgtacgtggccagtcaatggcaggttcaccgcacctcaggcagaactctatgaagccgttctagagatccaaagagattgtttggccctctgcttccctgggacaagcttggagaacatctacagcatgatgctgaccctgataggacagaagcttaaagacttggggatcatgaagaacattaaggaaaataatgccttcaaggctgctcgaaaatactgtcctcatcatgttggccactacctcgggatggatgtccatgacactccagacatgccccgttccctccctctgcagcctgggatggtaatcacaattgagcccggcatttatattccagaggatgacaaagatgccccagagaagtttcggggtcttggtgtacgaattgaggatgatgtagtggtgactcaggactcacctctcatcctttctgcagactgtcccaaagagatgaatgacattgaacagatatgcagccaggcttcttgaccttcactgcggcccacatgcacctcaggttcaaaatgggtgtcttctggcagccctgcacgtgtgctttctgagtgtctctgtgtgtgcattaatatatgcattccatttgggagcatagcagctgtgtgaatgtatgtaattgtgtgtggggggttttttgttttaagtagttagaagtctgggaaaatgaatttttgaatagtatgttactgcagctttggtaacattaattctatagaattaatgatcagagcaagtttaatttttaaacataaaggtcttggttacacatgtccatgcattccagttaacacatttaaacatatagaaaattcacttcttctttcaagtccttccctttctatacttttgctgagatcaacccaatatcataagaagtttgtgtgatgcctgtatttttagctaattaccaaggtctctgcctatgcaaaaattcatctttcggtgattgtgggcggccaatacataccttctgtaactcctccctacctattctagatcctgcatatctactggagccatatgagccctcaggggcactggtgtcctgcagtcttactagtcagccacagtccaggttccagcaacactagctacctaccaaacaaaacacttctgagcttttcttgccatttggttgcctgggacctggaaagtgtttagattcttgataaagatggaaatggaagagaaagaaaattatatatgtatatactaaagatccagacatcagggctgggcacagcggttccgcctgtaatcccagcactttgggaggtccaggcaggtggatctcttgagaccaggaggtcaagaccagcctggccaacgtggtgaaacactgtctctactaaaaatacaaaaatgagctgggtgtgatgatacatgcctgtggtcctggctacttgggaggctgaggcatgagaattgcttgaacctgggaggtggaggttgcagtgagctgagctcatgcgactgcactccagcctgggtgactgagcaagactctgcctcaaaaaaacaaataaataaataaaatcctgacatcctgccatcttttctcttcaatttaaagttgatttcttaatgatgacttcaaaaattaataaaaagaaaagaaaaaaatgatttctggccgggcgtggtggctcaagcctgtaatcccagcactttgggaggccgaggtgggcggatcacgaggtcaggagattgagacctcctggctaacacggtgaaaccccgtctttactaaaaatacaaaaaaaattagctgggcgtggtggcggatgcctgtagtcccagctactcaggaggctgaggcaggagaatggcgtgaacccagaaggcagagcttgcagtgagccaagatcgcgccactgcactccagcctgggtgacagagcgagactccgtctcaaaaaaaaaaaa

SEQ ID NO: 329 - DNA, 4657 bp, Homo sapien
aattgtgttcaaatgttatatatttgaagagtcaatttaacaattccttttggtagacttcttttgcacctctttacgcttcttttttttttcctcttaccaccctctttgactcctgctgagaaaatagggggatctctgttgctggtaacccaagatatacctccctcatcattgtccacgaaagtatattgagatacatgtttggagctgtgagaatttggtgaatagttgttgaatgactgtgttctccagctgcattcttttgcaaagccctcttcattggccacactatttacaagaaaaaatgtcaactctccattatcttcagcttctctttcttgatcactttcaataattttctttgtattaatatttctgccattaacgattttgtctgaagttgtaacagatatgtagttgtccatcccactattatcaaaagccagggaagagaaagaagtaaggccttcatgccccaatgaaccctgtgatgtatatcctgtatcatatgaagaaaatttctcaaaaattggatattcactggcagtggagaaaaagtatcctgcatctctgtttctgtttccataggagcttcctggacgatttaacaggtcctcaagcgagtcttcaaagaagtgaaaagaaaatggatccctttcatgaaaaatttctttaaaaacatcatctggcttatggaatgtgaagccgtactcacattcatcatcaaaatgacttccacctccgtttaatccttctgtgccatatttatcataaatgtcccgtttctcatcatttgataatacctcgtatgcctcagctacttctttgaattttctctctgcttcttctttattttctggatttttatcagggtgccatttaagtgccactttatgataagcttttttaatgtcctcaggtgaagcatatctttgcagtcctagaacttcatagtaatccaccatgttttaacagatagttggaagtgggtgtgctgggtattgagaaccgtggtttcctcagctcaggctctgctggtggtggtgatagaggtagtgactgcaaataggtacacttttatgttaaagacaatgttattaccatgtgctaagagatgaggatactgattatgtggcaagcagagttacaaatatgtcagagagggctgcattatggtgtcattctggggtcagtgtagggactggaccttccaaatagagctagtccagagtcgtaccagaccatcctgaatcctctggactgtttcccctgtatgtttccctggaagcttcaggcagtgcctcataagccaatggaatctgttgctaatagccacagcatatcccttgcataatatgacctctagattactgcgccttaattgcttcccagctcttctatgctttggtttagaaaaatgaagtactgacttacgggtgaagaaagtattcaaacagttgacatatttatttcagtcaagaaacagttcagagggagatacaaacaagtaacttagttacaatataatagttatgatgagaggaagtactggatgctaaacaattatatgagagacagctcaggctgggggtgtcaatgaaagcctcttggaggaagtagcctgatatgttaactttctgcatgccagtggatgtatgttgtgttcacagcgaaggtactcccttcagcctgtcccagaaaggaggattccaaaccgatacttaggccagcccagcccctttacacacccacacctcctcagaccaggggaggtaactccaggactatctcaggtggaatatgcacttcgcagacacaaactaatgtctctgatccagaaggaagctcaagggcagagtgggacagaccagacagtggttgtgctctccaaccctacatactacatgagcaacgatattccctatactttccaccaagacaacaatttcctgtacctatgtggattccaagagcctgatagcattcttgtccttcagagcctccctggcaaacaattaccatcacacaaagccatactttttgtgcctcggcgagatcccagtcgagaactttgggatggtccgcgatctggcactgatggagcaatagctctaactggagtagacgaagcctatacgctagaagaatttcaacatcttctaccaaaaatgaaagctgagacgaacatggtttggtatgactggatgaggccctcacatgcacagcttcactctgactatatgcagcccctgactgaggccaaagccaagagcaagaacaaggttcggggtgttcagcagctgatacagcgcctccggctgatcaagtctcctgcagaaattgaacgaatgcagattgctgggaagctgacatcacagagacagggtttctcagtgttgtccaggctggtctcgaactcctgagctcaagcagtccgcccaccttgacctcccaaagtgctgggattacaggctttcatagaaaccatgttcaccagtaaagcccctgtggaagaagcctttctttatgctaagtttgaatttgaatgccgggctcgtggcgcagacattttagcctatccacctgtggtggctggtggtaatcggtcaaacactttgcactatgtgaaaaataatcaactcatcaaggatggggaaatggtgcttctggatggaggttgtgagtcttcctgctatgtgagtgacatcacacgtacgtggccagtcaatggcaggttcaccgcacctcaggcagaactctatgaagccgttctagagatccaaagagattgtttggccctctgcttccctgggacaagcttggagaacatctacagcatgatgctgaccctgataggacagaagcttaaagacttggggatcatgaagaacattaaggaaaataatgccttcaaggctgctcgaaaatactgtcctcatcatgttggccactacctcgggatggatgtccatgacactccagacatgccccgttccctccctctgcagcctgggatggtaatcacaattgagcccggcatttatattccagaggatgacaaagatgccccagagaagtttcggggtcttggtgtacgaattgaggatgatgtagtggtgactcaggactcacctctcatcctttctgcagactgtcccaaagagatgaatgacattgaacagatatgcagccaggcttcttgaccttcactgcggcccacatgcacctcaggttcaaaatgggtgtcttctggcagccctgcacgtgtgctttctgagtgtctctgtgtgtgcattaatatatgcattccatttgggagcatagcagctgtgtgaatgtatgtaattgtgtgtggggggttttttgttttaagtagttagaagtctgggaaaatgaatttttgaatagtatgttactgcagctttggtaacattaattctatagaattaatgatcagagcaagtttaatttttaaacataaaggtcttggttacacatgtccatgcattccagttaacacatttaaacatatagaaaattcacttcttctttcaagtccttccctttctatacttttgctgagatcaacccaatatcataagaagtttgtgtgatgcctgtatttttagctaattaccaaggtctctgcctatgcaaaaattcatctttcggtgattgtgggcggccaatacataccttctgtaactcctccctacctattctagatcctgcatatctactggagccatatgagccctcaggggcactggtgtcctgcagtcttactagtcagccacagtccaggttccagcaacactagctacctaccaaacaaaacacttctgagcttttcttgccatttggttgcctgggacctggaaagtgtttagattcttgataaagatggaaatggaagagaaagaaaattatatatgtatatactaaagatccagacatcagggctgggcacagcggttccgcctgtaatcccagcactttgggaggtccaggcaggtggatctcttgagaccaggaggtcaagaccagcctggccaacgtggtgaaacactgtctctactaaaaatacaaaaatgagctgggtgtgatgatacatgcctgtggtcctggctacttgggaggctgaggcatgagaattgcttgaacctgggaggtggaggttgcagtgagctgagctcatgcgactgcactccagcctgggtgactgagcaagactctgcctcaaaaaaacaaataaataaataaaatcctgacatcctgccatcttttctcttcaatttaaagttgatttcttaatgatgacttcaaaaattaataaaaagaaaagaaaaaaatgatttctggccgggcgtggtggctcaagcctgtaatcccagcactttgggaggccgaggtgggcggatcacgaggtcaggagattgagacctcctggctaacacggtgaaaccccgtctttactaaaaatacaaaaaaaattagctgggcgtggtggcggatgcctgtagtcccagctactcaggaggctgaggcaggagaatggcgtgaacccagaaggcagagcttgcagtgagccaagatcgcgccactgcactccagcctgggtgacagagcgagactccgtctcaaaaaaaaaaaa

SEQ ID NO: 330 - DNA, 3128 bp, Homo sapien
ggaaggaaatattagtttgcatttttctaaagcatccaaactgttggagatggataagtgcatttataccatgaagactttctagatctattgtttcatttcattctctttattcttcattcaggatgtatgttgtgttcacagcgaaggtactcccttcagcctgtcccagaaaggaggattccaaaccgatacttaggccagcccagcccctttacacacccacacctcctcagaccaggggaggtaactccaggactatctcaggtggaatatgcacttcgcagacacaaactaatgtctctgatccagaaggaagctcaagggcagagtgggacagaccagacagtggttgtgctctccaaccctacatactacatgagcaacgatattccctatactttccaccaagacaacaatttcctgtacctatgtggattccaagagcctgatagcattcttgtccttcagagcctccctggcaaacaattaccatcacacaaagccatactttttgtgcctcggcgagatcccagtcgagaactttgggatggtccgcgatctggcactgatggagcaatagctctaactggagtagacgaagcctatacgctagaagaatttcaacatcttctaccaaaaatgaaagctgagacgaacatggtttggtatgactggatgaggccctcacatgcacagcttcactctgactatatgcagcccctgactgaggccaaagccaagagcaagaacaaggttcggggtgttcagcagctgatacagcgcctccggctgatcaagtctcctgcagaaattgaacgaatgcagattgctgggaagctgacatcacagagacagggtttctcagtgttgtccaggctggtctcgaactcctgagctcaagcagtccgcccaccttgacctcccaaagtgctgggattacaggctttcatagaaaccatgttcaccagtaaagcccctgtggaagaagcctttctttatgctaagtttgaatttgaatgccgggctcgtggcgcagacattttagcctatccacctgtggtggctggtggtaatcggtcaaacactttgcactatgtgaaaaataatcaactcatcaaggatggggaaatggtgcttctggatggaggttgtgagtcttcctgctatgtgagtgacatcacacgtacgtggccagtcaatggcaggttcaccgcacctcaggcagaactctatgaagccgttctagagatccaaagagattgtttggccctctgcttccctgggacaagcttggagaacatctacagcatgatgctgaccctgataggacagaagcttaaagacttggggatcatgaagaacattaaggaaaataatgccttcaaggctgctcgaaaatactgtcctcatcatgttggccactacctcgggatggatgtccatgacactccagacatgccccgttccctccctctgcagcctgggatggtaatcacaattgagcccggcatttatattccagaggatgacaaagatgccccagagaagtttcggggtcttggtgtacgaattgaggatgatgtagtggtgactcaggactcacctctcatcctttctgcagactgtcccaaagagatgaatgacattgaacagatatgcagccaggcttcttgaccttcactgcggcccacatgcacctcaggttcaaaatgggtgtcttctggcagccctgcacgtgtgctttctgagtgtctctgtgtgtgcattaatatatgcattccatttgggagcatagcagctgtgtgaatgtatgtaattgtgtgtggggggttttttgttttaagtagttagaagtctgggaaaatgaatttttgaatagtatgttactgcagctttggtaacattaattctatagaattaatgatcagagcaagtttaatttttaaacataaaggtcttggttacacatgtccatgcattccagttaacacatttaaacatatagaaaattcacttcttctttcaagtccttccctttctatacttttgctgagatcaacccaatatcataagaagtttgtgtgatgcctgtatttttagctaattaccaaggtctctgcctatgcaaaaattcatctttcggtgattgtgggcggccaatacataccttctgtaactcctccctacctattctagatcctgcatatctactggagccatatgagccctcaggggcactggtgtcctgcagtcttactagtcagccacagtccaggttccagcaacactagctacctaccaaacaaaacacttctgagcttttcttgccatttggttgcctgggacctggaaagtgtttagattcttgataaagatggaaatggaagagaaagaaaattatatatgtatatactaaagatccagacatcagggctgggcacagcggttccgcctgtaatcccagcactttgggaggtccaggcaggtggatctcttgagaccaggaggtcaagaccagcctggccaacgtggtgaaacactgtctctactaaaaatacaaaaatgagctgggtgtgatgatacatgcctgtggtcctggctacttgggaggctgaggcatgagaattgcttgaacctgggaggtggaggttgcagtgagctgagctcatgcgactgcactccagcctgggtgactgagcaagactctgcctcaaaaaaacaaataaataaataaaatcctgacatcctgccatcttttctcttcaatttaaagttgatttcttaatgatgacttcaaaaattaataaaaagaaaagaaaaaaatgatttctggccgggcgtggtggctcaagcctgtaatcccagcactttgggaggccgaggtgggcggatcacgaggtcaggagattgagacctcctggctaacacggtgaaaccccgtctttactaaaaatacaaaaaaaattagctgggcgtggtggcggatgcctgtagtcccagctactcaggaggctgaggcaggagaatggcgtgaacccagaaggcagagcttgcagtgagccaagatcgcgccactgcactccagcctgggtgacagagcgagactccgtctcaaaaaaaaaaaa

SEQ ID NO: 331 - DNA, 1490 bp, Homo sapien
ggctggcccggtttcctggcgacgcggccctgcaggcggttgcgttccccgtcgttaccctctttctcttcccgacgcgtgagttaggccgtaatgccttggctgctctcagcccccaagctggttcccgctgtagcaaacgtccgcggcctctcagggtcttactttgtcacccaagctggagtgcagtggcgtgatcccattacactgcaacctatgtcttccaggctcaagcagtctttctaccagcttcccgagtagctgggactacaggagcttcctggacgatttaacaggtcctcaagcgagtcttcaaagaagtgaaaagaaaatggatccctttcatgaaaaatttctttaaaaacatcatctggcttatggaatgtgaagccgtactcacattcatcatcaaaatgacttccacctccgtttaatccttctgtgccatatttatcataaatgtcccgtttctcatcatttgataatacctcgtatgcctcagctacttctttgaattttctctctgcttcttctttattttctggatttttatcagggtgccatttaagtgccactttatgataagcttttttaatgtcctcaggtgaagcatatctttgcagtcctagaacttcatagtaatccaccatgttttaacagatagttggaagtgggtgtgctgggtattgagaaccgtggtttcctcagctcaggctctgctggtggtggtgatagaggtagtgactgcaaataggtacacttttatgttaaagacaatgttattaccatgtgctaagagatgaggatactgattatgtggcaagcagagttacaaatatgtcagagagggctgcattatggtgtcattctggggtcagtgtagggactggaccttccaaatagagctagtccagagtcgtaccagaccatcctgaatcctctggactgtttcccctgtatgtttccctggaagcttcaggcagtgcctcataagccaatggaatctgttgctaatagccacagcatatcccttgcataatatgacctctagattactgcgccttaattgcttcccagctcttctatgctttggtttagaaaaatgaagtactgacttacgggtgaagaaagtattcaaacagttgacatatttatttcagtcaagaaacagttcagagggagatacaaacaagtaacttagttacaatataatagttatgatgagaggaagtactggatgctaaacaattatatgagagacagctcaggctgggggtgtcaatgaaagcctcttggaggaagtagcctgatatgttaactttctgcatgccagtggtaagtcatttgagattatagtatctttgtccacccaaggtttactgctgtaaaacatgtaattaaagatttggaaagttgtgtgtttatgtattcactgtataattattgacttgtctactttgtgccaggcaccgttttagccactggtgata

SEQ ID NO: 332 - DNA, 1132 bp, Homo sapien
ggctggcccggtttcctggcgacgcggccctgcaggcggttgcgttccccgtcgttaccctctttctcttcccgacgcgtgagttaggccgtaatgccttggctgctctcagcccccaagctggttcccgctgtagcaaacgtccgcggcctctcagaagacactatgtgtgcatgagtacgtgtgcacgagcgtgcatgtggagaaggtgcaggaggagagaaagagaaatcaccaatgcaacagcagcctactccaccagtgggttagtgctgctggagggagatgaaaagattaggaaggtaagatagctttgaaggctttgtattctaaattaaggagttagatttttaactgtcacgtgaggtaggcattatcatcattattttacaaacacagaatcagactcagagaagtaatctggacaaggttacacacttagtaccagagaagctgagattcaaactcaggtttatttgacttcataatctttgctcttatccctcccccttgccgctcactaggtcctctctgtttaatctcaacaatcaatactgtacaatctccttgtgaacatacaatttctgtaaggactatgaattatgaataataatatatgtatttgggagagaagagtcttaaaagttaattccagtttgtagaagattgtttagaaaaatcatagcttcttctaaaaagatttaaaaaaaagaaaaatcatagcttctaagatgattacaaagaaattggtgtgggtttccaacctgggcaacatagtgagacctcatctctaccaaaaataaaaaaaattaaccagtcttggtggcacatacctgtagtcccagctacttgggaggctgagccactgactccagcctgggcaacagagtgagactctgtcttaaaaataaataaatgaataaatattgaaggagagaaggaaggaaatattagtttgcatttttctaaagcatccaaactgttggagatggataagtgcatttataccatgaagactttctagatctattgtttcatttcatttattgcctaagcccagaggaacaaagctgcagtgagctatgatcatgccactacactccagcctgggcgacagagtgagacctgtctc

SEQ ID NO: 333 - DNA, 585 bp, Homo sapien
ataaatgcttgaggtgatggatacctcatccgagaaaaatgtggaagagaaattagcggacagacttgggggatctcaaaagagggcttaaagatttgctgagcagtggaaagcctgagggtcctcgcacatgttcccttcacatggccaactccctcccctccttcaggggtcagtttgaggccaggggccctcctctgcactgctatcatccaccggcttggatctaccataatactccttatcttaaactctaagtattgaacttgtttgaaaggtccttgtgcatagggcctttgttttatccaacactgtttgcccagactcaggaaagaatctcttcaataataaatgctcaataggtatttgttaagcaaataggtgaataagtctaggggttctccattaaaatgtgtttgctgactttctctggcctgtgggcagtcatggaggaggcagtcaatggagcagggctaagatcagggactggcgtgatggctctgagaggatcaaggcattggggctccagcatgtcagaggaggcagcatcaaaccagaccacaatgaactcaggctggatcagga

SEQ ID NO: 334 - DNA, 607 bp, Homo sapien
ataaatgcttgaggtgatggatacctcaacaaaaaaaaatgtggaagagaaattagcggacagacttgggggatctcaaaagagggcttaaagatttgctgagcagtggaaagcctgagggtcctcgcacatgttcccttcacatggccaactccctcccctccttcaggggtcagtttgaggccaggggccctcctctgcactgctatcatccaccggcttggatctaccataatactccttatcttaaactctaagtattgaacttgtttgaaaggtccttgtgcatagggcctttgttttatccaacactgtttgcccagactcaggaaagaatctcttcaataataaatgctcaataggtatttgttaagcaaataggtgaataagtctaggggttctccattaaaatgtgtttgctgactttctctggcctgtgggcagtcatggaggaggcagtcaatggagcagggctaagatcagggactggcgtgatggctctgagaggatcaaggcattggggctccagcatgtcagaggaggcagcatcaaaccagaccacaatgaactcaggctggatcaggaggaaccactcaaggacacagat

SEQ ID NO: 335 - DNA, 199 bp, Homo sapien
agtgcacagaagacattttccaggatagagtgtatattaggtaacaaattaagtttccatagatttttaaagatatcatacagagtatcttttctgactacaactggataatgttagatatcagaaatagaactaaaactggactattcacaaatttatggaaattaaaaaacatactgttaaccagtagatcaaagac

SEQ ID NO: 336 - DNA, 613 bp, Homo sapien
gatacaacagatataaacatttgcacagaccgataacaggccaaaatatatgaagcaaaaactgaaggaagaaatagttctacagtaatagttggaaacttcattaccctactctcaataatggatagaagaaccagacagaaggtaagtaaggaaacagaggacttaataaacaaactagatctaacagacatacacagaacactctatcctacaacaagagcatatacattcttctcaagtgcacagaagacattttccaggatagagtgtatattaggtaacaaattaagtttccatagatttttaaagatatcatacagagtatcttttctgactacaactggataatgttagatatcagaaatagaactaaaactggactattcacaaatttatggaaattaaaaaacatactgttaaccagtagatcaaagacgaaatcacaagggaaattagaaaatacttagaggtcagctgggtgcagtggctcatacctgtaatcccagcagtttgggaggccaaagtaggaggattgctggaggccaggagttcaggacctgcctgggcaacatggtgaagccccatctctattaaaaacgaaaaaaaaaaa

SEQ ID NO: 337 - DNA, 606 bp, Homo sapien
atataaacatttgcacagaccgataacaggccaaaatatatgaagcaaaaactgaaggaagaaatagttctacagtaatagttggaaacttcattaccctactctcaataatggatagaagaaccagacagaaggtaagtaaggaaacagaggacttaataaacaaactagatctaacagacatacacagaacactctatcctacaacaagagcatatacattcttctcaagtgcacagaagacattttccaggatagagtgtatattaggtaacaaattaagtttccatagatttttaaagatatcatacagagtatcttttctgactacaactggataatgttagatatcagaaatagaactaaaactggactattcacaaatttatggaaattaaaaaacatactgttaaccagtagatcaaagaagaaatcacaagggaaattagaaaatacttagaggtcagctgggtgcagtggctcatacctgtaatcccagcagtttgggaggccaaagtaggaggattgctggaggccaggagttcaggacctgcctgggcaacatggtgaagccccatctctattaaaaactttaaaaaagaaaaa

SEQ ID NO: 338 - DNA, 1041 bp, Homo sapien
acctcctttgggataagacaagagaagctactgactctactcgtatctccctgttctctggtttctggaccccagtggtccagagcttgctttctcggtgcacagaagcattttctcccactgaattgccttgttttacgaccctgagttaaatctatattacaaatcaagtgtggagtattttttcaactgaaagggcagtgacatacagaaaaaattaaccaagggccacgtaaaggtcaagtccaatttgttgttatattaggattttttttattggcactccaggaaatatcaaaggtgaaacgtgattgcttttaaattaggatcaaggaggcttcaagttaacgaattctgtctaagcctgcttattaggtgatcctgactgtgaagtgatctcacattttcttatgagaagatatggagagagacagaaagagagaatattttagattttcaaccatcttaaatacgtaaacttttcaggttgtagaaaaggtagctaaaaatattcttaaaagatttaattttgggttagatacagagatttaaaatcatagactatataaaataattcattaagttaatattgctttgtttcacttttacattttataaaatgattttatctaaactctttgtacgcatctttggcttgtgtcttcaccactaaagccaattttgagtcttttaaaattgtttcccagatatattcactaataaaagataattttgtcttctatatagatgaacctcagatttttgaagtcttaacccaatgaaaattaatttcacacttatctaacagtacaatgcaggtgtacattaatagatgtgattcacacgtggtgattcaggcacccagggttccctctttggacctacggtttcaagagtgctgtgctcacttgcaggcagcttgtagaaaggaatgaaagggtggaggcagcaacccgcttatcaaccacgtcagccttttaaaggggacacatatcatttctgctcactttctactggctaaattagtgacttggtcctacc

SEQ ID NO: 339 - DNA, 1230 bp, Homo sapien
acctcctttgggataagacaagagaagctactgactctactcgtatctccctgttctctggtttctggaccccagtggtccagagcttgctttctcggtgcacagaagcattttctcccactgaattgccttgttttacgaccctgagttaaatctatattacaaatcaagtgtggagtattttttcaactgaaagggcagtgacatacagaaaaaattaaccaagggccacgtaaaggtcaagtccaatttgttgttatattaggattttttttattggcactccaggaaatatcaaaggtgaaacgtgattgcttttaaattaggatcaaggaggcttcaagttaacgaattctgtctaagcctgcttattaggtgatcctgactgtgaagtgatctcacattttcttatgagaagatatggagagagacagaaagagagaatattttagattttcaaccatcttaaatacgtaaacttttcaggttgtagaaaaggtagctaaaaatattcttaaaagatttaattttgggttagatacagagatttaaaatcatagactatataaaataattcattaagttaatattgctttgtttcacttttacattttataaaatgattttatctaaactctttgtacgcatctttggcttgtgtcttcaccactaaagccaattttgagtcttttaaaattgtttcccagatatattcactaataaaagataattttgtcttctatatagatgaacctcagatttttgaagtcttaacccaatgaaaattaatttcacacttatctaacagtacaatgcaggtgtacattaatagatgtgattcacacgtggtgattcaggcacccagggttccctctttggacctacggtttcaagagtgctgtgctcacttgcaggcagcttgtagaaaggaatgaaagggtggaggcagcaacccgcttatcaaccacgtcagccttttaaaggggacacatatcatttctgctcactttctactggctaaattagtgacttggtcctacctaggtacaacgtagtcttggcaatgtggtcacttctgagccataattcaattctatggaaagagaataacagagtttgatggagtattggtcatctaggccatatcatcttaagacagaagatgctgttactgaaaaagttattccaagatataagtaccattcataatacatattagggaggttatga

SEQ ID NO: 340 - DNA, 1234 bp, Homo sapien
atctcctttgggataagacaagagaagctactgactctactcgtatctccctgttctctggtttctggaccccagtggtccagagcttgctttctcggtgcacagaagcattttctcccactgaattgccttgttttacgaccctgagttaaatctatattacaaatcaagtgtggagtattttttcaactgaaagggcagtgacatacagaaaaaattaaccaagggccacgtaaaggtcaagtccaatttgttgttatattaggattttttttattggcactccagggaaatatcaaaggtgaaacgtgattgcttttaaattaggatcaaggaggcttcaagttaacgaattctgtctaagcctgcttattaggtgatcctgactgtgaagtgatctcacattttcttatgagaagatatggagagagacagaaagagagaatattttagattttcaaccatcttaaatacgtaaacttttcaggttgtagaaaaggtagctaaaaatattcttaaaagatttaattttgggttagatacagagatttaaaatcatagactatataaaataattcattaagttaatattgctttgtttcacttttacattttataaaatgattttatctaaactctttgtactcatctttggcttgtgtcttcaccactaaagccaattttgagtcttttaaaattgtttcccagatatattcactaataaaagataattttgtcttctatatagatgaacctcagatttttgaagtcttaacccaatgaaaattaatttcacacttatctaacagtacaatgcaggtgtacattaatagatgtgattcacacgtggtgattcaggcacccagggttccctctttggacctacggtttcaagagtgctgtgctcacttgcaggcagcttgtagaaaggaatgaaagggtggaggcagcaacccgcttatcaaccacgtcagccttttaaaggggacacatatcatttctgctcactttctactggctaaattagtgacttggtcctacctaggtacaacgtagtcttggcaatgtggtcacttctgagccataattcaattctatggaaagagaataacagagtttgatggagtattggtcatctaggccatatcatcttaagacagaagatgctgttactgaaaaagttattccaagatataagtacccattcataatacatattagggaggtttttgta

SEQ ID NO: 341 - DNA, 1796 bp, Homo sapien
  misc_feature (1373)..(1373): n=a,c,g or t
tgcagtgagacatttttatccatcctgatcacagcacttgcctccgggctcatgaagcccagcatgttactgctgttctgaacgtctctgctttttgagagacatgtttaatgaattgggagtatctgtgcacattgcattcacttaaaaagggaaaaataccttttaacagttatagctacagaaattcaatttagtttatttaggaggaaatgagagacttgaattgtaggtgtgaaatcttacaatctttcagaatgatttggtttgggggatggttggaactgcatggaattccttcagccaaaataatttttgtgagcacattcccaagctcacgatcatgttttgataagaaaaatccctttctccacaagttctcaggtcccactcattggcccctgccctcatttctggaacctatgttaggcagttatgtggctcagttcttggtgatatgttttcaatttgagtcaacttgatgagagaaaaattactaaaaagtgggaatgagctgtgaggtgaacagggttttcctatcaaagtggaggtatttttaaaagcatttattatttcaaactcaaacatttatagaaagccatgagtgtgaagtgtatgattaccagttgtggcttgctgcattgaaaaattcaagttcataggaaatatttactgaggctctggtttgcaagcagtttgttcaagagaacaatttggtccagaaggcatgtcagccaaaaaagagtttactaatatagtagtaacaggcaattaggattcataagcatcgccatggctgagacatgatttaaggtcttagatggaaagagttctgttattaagataacagaatttaaatgctgtatctgtctaggtcttatgcatgtcagaagtgagaaaactactccttcattttccatttttatgagctctgatgtaacacagttttttttttttctgtgttgaaaatgatgaatatagttcttggcacatttgttccatagtaaagaagaatttaacttgcaagtgaaaaacctctgcctttggccatggattaaaaagatgttatatgatgaagtttacttcctaaggaaaggttagttttgtgtggcactttctgaaaatttgtttgggacatatacaattcttttgtataaattctggaggtctgaggaaaattacttaatcacattagatgagaacatttctttttgtgtgaattgagttcttatcaaggttctgatgttttttctcatgtatttgcccttgggttcatctcaatacaatgcatttgtgtactattgaataaaaagcaggctgcaacagtatttatgacatatgatcctatatacacgtaaaacctgtgtgtgtgnttgtgtgtgcacatgcatataaaaaaaactacattgttaaagttgttaatagttaactcccggtggtgggttttaagtgattattattttctttgtataagaaaaatagtgcacagttttcttttgttgttatgaaaggtgtcatacatttgaaagaggacatatgcacagtttaaataataataacatagtgaatacccactgcttggctgaaaaaaataatttattactctgttgcagaaggcaagccttccttctgcccctgcctctgtcatggaggtagctacttgcttgaattttgtgctaatcatgtctttgctttcttatatagtttagccagctgtgaatgtctccataaaacatacacagttttattttgattgtttttgaactttaaataaatgaaatcatactggataaaaa

SEQ ID NO: 342 - DNA, 1800 bp, Homo sapien
tgcagtgagacatttttatccatcctgatcacagcacttgcctccgggctcatgaagcccagcatgttactgctgttctgaacgtctctgctttttgagagacatgtttaatgaattgggagtatctgtgcacattgcattcacttaaaaagggaaaaataccttttaacagttatagctacagaaattcaatttagtttatttaggaggaaatgagagacttgaattgtaggtgtgaaatcttacaatctttcagaatgatttggtttgggggatggttggaactgcatggaattccttcagccaaaataatttttgtgagcacattcccaagctcacgatcatgttttgataagaaaaatccctttctccacaagttctcaggtcccactcattggcccctgccctcatttctggaacctatgttaggcagttatgtggctcagttcttggtgatatgttttcaatttgagtcaacttgatgagagaaaaattactaaaaagtgggaatgagctgtgaggtgaacagggttttcctatcaaagtggaggtatttttaaaagcatttattatttcaaactcaaacatttatagaaagccatgagtgtgaagtgtatgattaccagttgtggcttgctgcattgaaaaattcaagttcataggaaatatttactgaggctctggtttgcaagcagtttgttcaagagaacaatttggtccagaaggcatgtcagccaaaaaagagtttactaatatagtagtaacaggcaattaggattcataagcatcgccatggctgagacatgatttaaggtcttagatggaaagagttctgttattaagataacagaatttaaatgctgtatctgtctaggtcttatgcatgtcagaagtgagaaaactactccttcattttccatttttatgagctctgatgtaacacagttttttttttttctgtgttgaaaatgatgaatatagttcttggcacatttgttccatagtaaagaagaatttaacttgcaagtgaaaaacctctgcctttggccatggattaaaaagatgttatatgatgaagtttacttcctaaggaaaggttagttttgtgtggcactttctgaaaatttgtttgggacatatacaattcttttgtataaattctggaggtctgaggaaaattacttaatcacattagatgagaacatttctttttgtgtgaattgagttcttatcaaggttctgatgttttttctcatgtatttgcccttgggttcatctcaatacaatgcatttgtgtactattgaataaaaagcaggctgcaacagtatttatgacatatgatcctatatacacgtaaaatcttgtgtgtgtgtttgtgtgtgcacatgcatataaaaaaaactacattgttaaagttgttaatagttaactcccggtggtgggttttaagtgattattattttctttgtataagaaaaatagtgcacagttttcttttgttgttacgaaaggtgtcatacatttgaaagaggacatatgcacagtttaaataataataacatagtgaatacccactgcttggctgaaaaaaataatttattactctgttgcagaaggcaagccttccttctgcccctgcctctgtcatggaggtagctacttgcttgaattttgtgctaatcatgtctttgctttcttatatagtttagccagctgtgaatgtctccataaaacatacacagttttattttgattgtttttgaactttaaataaatgaaatcatactggaaaaaaaaaa

SEQ ID NO: 343 - DNA, 1740 bp, Homo sapien
ccagcatgttactgctgttctgaacgtctctgctttttgagagacatgtttaatgaattgggagtatctgtgcacattgcattcacttaaaaagggaaaaataccttttaacagttatagctacagaaattcaatttagtttatttaggaggaaatgagagacttgaattgtaggtgtgaaatcttacaatctttcagaatgatttggtttgggggatggttggaactgcatggaattccttcagccaaaataatttttgtgagcacattcccaagctcacgatcatgttttgataagaaaaatccctttctccacaagttctcaggtcccactcattggcccctgccctcatttctggaacctatgttaggcagttatgtggctcagttcttggtgatatgttttcaatttgagtcaacttgatgagagaaaaattactaaaaagtgggaatgagctgtgaggtgaacagggttttcctatcaaagtggaggtatttttaaaagcatttattatttcaaactcaaacatttatagaaagccatgagtgtgaagtgtatgattaccagttgtggcttgctgcattgaaaaattcaagttcataggaaatatttactgaggctctggtttgcaagcagtttgttcaagagaacaatttggtccagaaggcatgtcagccaaaaaagagtttactaatatagtagtaacaggcaattaggattcataagcatcgccatggctgagacatgatttaaggtcttagatggaaagagttctgttattaagataacagaatttaaatgctgtatctgtctaggtcttatgcatgtcagaagtgagaaaactactccttcattttccatttttatgagctctgatgtaacacagtttttttttttttctgtgttgaaaatgatgaatatagttcttggcacatttgttccatagtaaagaagaatttaacttgcaagtgaaaaacctctgcctttggccatggattaaaaagatgttatatgatgaagtttacttcctaaggaaaggttagttttgtgtggcactttctgaaaatttgtttgggacatatacaattcttttgtataaattctggaggtctgaggaaaattacttaatcacattagatgagaacatttctttttgtgtgaattgagttcttatcaaggttctgatgttttttctcatgtatttgcccttgggttcatctcaatacaatgcatttgtgtactattgaataaaaagcaggctgcaacagtatttatgacatatgatcctatatacacgtaaaatcttgtgtgtgtgtttgtgtgtgcacatgcatataaaaaaaactacattgttaaagttgttaatagttaactcccggtggtgggttttaagtgattattattttctttgtataagaaaaatagtgcacagttttcttttgttgttacgaaaggtgtcatacatttgaaagaggacatatgcacagtttaaataataataacatagtgaatacccactgcttggctgaaaaaaataatttattactctgttgcagaaggcaagccttccttctgcccctgcctctgtcatggaggtagctacttgcttgaattttgtgctaatcatgtctttgctttcttatatagtttagccagctgtgaatgtctccataaaacatacacagttttattttgattgtttttgaactttaaataaatgaaatcatactggataaaaa

SEQ ID NO: 344 - DNA, 371 bp, Homo sapien
gaaacatacacacgcgcaatgcttccatttccaaatatctctatcaagggctatttgcgattagcaaaatgttacatgtcacagagtagatggggaacagagagtgttctaaatcttcctcctctaatgcttagagcactgttctgttttatatatgaagctttcctttactgaatttgagacacaaaatgtaatgctgcgttgttgggaatactactcatatagagtgaggaaaactaattaaactagtagaacacttagctattaagggtttgatatgtgttcagagatactgtgaaacacagcttatgggaatattgatacaattttatcttcttccttttaggttaagagaggctgattttataagt

SEQ ID NO: 345 - DNA, 351 bp, Homo sapien
gaaacatacacacgcgcaatgcttccatttccaaatatctctatcaagggctatttgcgattagcaaaatgttacatgtcacagagtagatggggaacagagagtgttctaaatcttcctcctctaatgcttagagcactgttctgttttatatatgaagctttcctttactgaatttgagacacaaaatgtaatgctgcgttgttgggaatactactcatatagagtgaggaaaactaattaaactagtagaacacttagctattaagggtttgatatgtgttcagagatactgtgaaacacagcttatgggaatattgatacaattttatcttcttccttttaggttaa

SEQ ID NO: 346 - DNA, 694 bp, Homo sapien
ggggggctagggacagtggtcatacttttctctaagtgacacccccttgttagaaactgcgcccttagtggagggggtaggcagcagcccccggtctccttggtctgcctctttcagggtggaactcctgttgatgagctggggcaagggtgatcagggccccacttttcttggcagcaccacgcccaaggtagagcctccatcttaggagtaggggctgggtgaaagaaggggaacgttccccgcctctgtccatacttgctcagaatttagcttcagcaacaggtagctgggagcaagaggagaaatccagacctctttaggagttgggagagacgaagtcccgtgttcttggctatacctattgggaatggaatttctgtctccctgagctgtgggagggaggtagtgattcttggtttaaataccgtagcctctcactgttattactgagttgttacagattttcttgagtaaatcatgtgctgtgttgcccttagaaccgtctccagagactttaagtgattgtcctttttgcaaattttaccagttttgcagagggcaagcaggtccacagagctcctcacgctgacatggcagaagcagaactctgtgatatttgggtacagagccagatggactccttcggacaaactacagttctgtgttaacaaagttggtgctgctctgcatg

SEQ ID NO: 347 - DNA, 798 bp, Homo sapien
ggcggccgccagtgtgctggaaagggatttgtcaggtagattagaggaatccttatcaatcatcaatgaaaaagtaccttttaatgatacaagtaggtattatgtacagttttccattatttgtaactttgaatctctctgtggtagccaactaattaaagtaatttttaatcttttgggcaaaaaatttaattggccccacagaagattgctttctctttgttcatttgatcagccgtggtaatcatatttaacaggaagattttaaattgtcatataactactctaaagctggtcttcttggaagaagcccaaatccacattttttgattgcatgtatttagcattttccaaggtaaaaaacaacctgcacataaatagttgaatatttgtacaagaaaaattgttgattggggtgggggaaatgaggcttggtggtgggagttaaatcatcttaaaattatgacttaccccttggtcaattcccagcaatagctacgaagctaacttggttaagccttgcttcctattcaccctgggaatggtttgataatttacattcccaggaacaacaaaaagttaaaaaatactactttacatgtgtaataggtgccaaatttgcaacctttaggtaagaagtcaaaacctcaaaagcaaagaaaatatttgcttgtttggattttgaaacttacattcaaattgatgcacatttcctttttctgtaatcacatgattgaaattaatattttacttcccctaaatttgtttagggaagacctaaaaaaagaggaagaaaaa

SEQ ID NO: 348 - DNA, 544 bp, Homo sapien
atttattcactgagttttggaagctatctttagttaagaaacatgaaactgtgggtgaggagcagtggactaagtaaagagcatcccagtctctttcattattgaatgatgtgaacttaatcaatttaatttctctagcatgtcagtcaggattatggcaggaaatagaaggcattctgaagtaataacaaatggcaaggcactcagggaccatcaacagcaggaagccactactaacttcaggcttgaaaaggccaaggaaggaatagagtcaaggtggatgagccacttgacaggggctaaagtcctcggggataagcactgccagaatgctgtgctaaaacaaagacggtgagctggggaaaggcagacatactcagacctctctctctcttctttctctctgagggagagggagccctccaaacttcagatcctgtgggtttagtatcattatcttcagctctttgataccctgtgttagagtaatagctaaaggaagttcatgtcaataaattcatacttatatcacactttcagtctc

SEQ ID NO: 349 - DNA, 883 bp, Homo sapien
gtttacaaacatgtccatttttgtattctctgctttttatattttaattaagtggatggtttaagttgctgtgctttgataattagtggcattgcataccttttaatttgtttatagtcttgttcaagttttttgttgggtttttttttctttgccttcttctctgttgagttgtctatcttattggtttgcaaaaattccttgtatgttctagttattgggtctctgttggataaatgctttacagattctaattcaattctgagttttcttttcactcttgatgtttttcaatgagtagagtttttttttttatctcactatagtttaatttctcgatttatggttgtgctttttgtatcatgtctaataaatctcttcctattcgagggtcaaactttattattatatttttacctctgtggggtagttttggtttacattctgtaagatagtttttgggccactaaggtttatctgtattagtctctaagatacaacactctgttacttttcaaggttcaacagagtttggaaaagatttctaaactggagcaggaaaaagaacattggatgttggaagcacaattagccaaaatcaagctagagaaagaaaaccagcgaattgcagataagctgaagaatacaggtagtgcccagctggttgggctggcccaggaaaatgctgctgtgtcaaatactgctggccaggatgaagccacagctaaggctgtgttggagcccattcagagcaccagtctaattgggactttaaccaggacatctgacagtgaggtaacatgtgcttgtcatcatgttgtttgttagtaaatatctggcagcatgtttgttgacaaagtcctgcaaaagccatctttgtcta

SEQ ID NO: 350 - DNA, 628 bp, Homo sapien
ctcgtttagcattctttgtgtatgttggatgcaggggaggggtgatacaatattttttctttaattcttatgatgcttttatcatagcccctcttggagtctgtgccttatgaagaagcactggcaaaccgccgcatccttctcagctctactgaaagtcgagaaggccttgcacagcaagtatggcactgggaaaattatggaaattgttaaagaacagaaatgttaaatcccccatagaaagtttttaagatacgtagaatgattcaaaagtctgcataaataaacatgtgaaatgaattgtttaatacatactaaaaagcaaatagacataatttgttgaaaaacatgtgttgacactctaagtcatcttgattcagttggtggtataattggaactaaagtaatatcaacacactttggccatgatgattaattctttctttttaggtactagatttaaatgtctgaaataccaaagtataagagggggcaagagctagtgactctgagttatttttatttcttaaaggagcaagaatgaaaaatgtgcaatatttagtggtcagttgagtttagggagtgggtgggagtgggaggcactgtctttttcagaaaaaaaggaaaa

SEQ ID NO: 351 - DNA, 450 bp, Homo sapien
ctactccacatttttcttttgtgaattaaaaaagcttcagagtggtacgactcgtgggatgttgatttttgtctttttctttgctatttaggatgagctgacaactaccaagaggagttacgaggatcagttaagtatgatgagtgaccacctgtgcagcatgaatgagacattatctaaacagagagaagagattgacacactaaagatgtccagtaaggtatgtgaggtgaggtgaggtagtctctctgcaatataatatttaatgtgaggtattttattgttatgcatttcaggagcaagaggacataagatttaaagtgtttgtaagggccaggggcagtggcttaagcctgtaatcccagtactttgggaggctgaggtgggaggatcccttgaggccaggagttggagagcagagtgggcaatatagtgatacttcatctctac

SEQ ID NO: 352 - DNA, 3356 bp, Homo sapien
ccaccccgggaacccggaagtggaggaggaggcgcggcggcggcggcggcggcggctgcggtggccaagcaggcagatactgcctgacccgttcccgggagcgtgtctgggtttgggggcgggagacaggctgagccgcctgggcggcctggcctgtacggggcgggggaggccatggcctcggctgagttgcaggggaagtaccagaagctggctcaggagtactcgaagcttcgggctcagaatcaggttctgaaaaaaggtgttgtggatgaacaagcaaattctgcagctttaaaggagcaactgaaaatgaaggatcagtcattgagaaaactacaacaggaaatggacagtttgacatttcgaaatctgcagcttgccaagagggtagaactacttcaagatgaactagctctaagtgaaccacgaggcaagaaaaacaagaaaagtggagaatcttcttctcagttgagtcaagagcagaagagtgtctttgatgaagatctgcaaaagaagatagaagagaatgaacggttgcatatacaattttttgaagctgatgagcagcacaagcatgtggaagcagagctgaggagtcgactggccactctggagacagaagcagcccagcaccaagctgtggttgacggtctcacccggaagtacatggaaaccattgagaagctgcagaacgacaaggctaaactagaagtaagccccattgtgagagcacactaaaaaatagttacagcttttgtattaataaattgtctatccacttagagttagtcatttctggtgagacttttgcctgcagggtcttactaagtgtgctcctatctgtcgtagcctgagccatctgtgtttctttttcttctgaaattcaggtgaaatctcagactctagaaaaggaagccaaggaatgtcgacttcgaacggaagaatgtcaattacagttaaagactcttcatgaagatttgtcaggtagattagaggaatccttatcaatcatcaatgaaaaagtaccttttaatgatacaaaatatagtcagtacaacgctctgaacgttccactccacaataggagacaccagctgaagatgcgagatattgctgggcaggccctggcttttgttcaggatcttgtgacggctcttctaaactttcatacctacacagaacagaggattcaaatttttcctgttgattctgccattgacactatatctccattgaatcagaagttctcacaataccttcatgaaaatgcgtcctatgtccgccctcttgaggaaggaatgcttcatttatttgaaagtatcactgaggatactgtgactgtcttggagacaactgtgaaattgaaaactttttcagaacacttaacctcctacatatgttttcttaggaagattcttccctatcagttaaaaagtttagaagaagaatgtgaatcctctctttgcacatctgcgttaagagccaggaatctagagctgtcccaggacatgaaaaaaatgacagctgtgtttgagaagctgcagacttacatagctcttcttgccttgccaagtacagagccagatggactccttcggacaaactacagttctgtgttaacaaatgttggtgctgctctgcatggatttcatgacgttatgaaagatatttccaaacattatagtcaaaaagctgcaatagagcatgaacttccaacagcaacacagaagctgataacaactaatgactgtatcctgtcatcagtagtggcattaacaaatggagcaggaaagattgcatccttcttcagcaacaatttggactacttcattgcttcactgagctatggacctaaggcagcgagtggattcattagtcctctttcagctgaatgcatgctacagtataagaaaaaagctgctgcctatatgaagtctttgagaaagcccctcttggagtctgtgccttatgaagaagcactggcaaaccgccgcatccttctcagctctactgaaagtcgagaaggccttgcacagcaagttcaacagagtttggaaaagatttctaaactggagcaggaaaaagaacattggatgttggaagcacaattagccaaaatcaagctagagaaagaaaaccagcgaattgcagataagctgaagaatacaggtagtgcccagctggttgggctggcccaggaaaatgctgctgtgtcaaatactgctggccaggatgaagccacagctaaggctgtgttggagcccattcagagcaccagtctaattgggactttaaccaggacatctgacagtgaggttccagatgtggaatctcgtgaagacttaattaaaaatcactacatggcaaggatagtggaacttacgtctcagttgcagctggctgacagtaagtcagtgcatttttatgccgagtgccgagcactgtctaaaagactggccttggctgaaaagtctaaggaagcattgacagaagaaatgaaacttgccagtcagaacatcagcagacttcaggatgagctgacaactaccaagaggagttacgaggatcagttaagtatgatgagtgaccacctgtgcagcatgaatgagacattatctaaacagagagaagagattgacacactaaagatgtccagtaaggggaattctaaaaagaacaagagtcgatagttttgaaatagctggttggcgactgttctttccagacctgctcctgctgcacagagccgcagggctgagaccacgtccatgctggctgccttcaggaagctaaagtattgttggacctagtaaactagtcagtgttggaaacggccttgaaatatttaaaacatatttgtaaccagtgaggcaaatacagaagttgatgtcggcagtaaatggaaaacaatacgtatgtcatggatattgtaggtttccttatgctgtttttactgtgcactttttaaaattaggttttaatttcagtatgtaagaacaaatattttgtatactttcaaactcaattatatggtaatcgatttggtatctatggaatagatatatgtttctggaaaaaaatgcttaaattgtcaaactgtcattacttcttattatagttgaaggcattctccagattctttttaaaagatttgttcatatttctctctctctctctctctctctctctctctctctctctcttctttctctctgagggagagggagccctccaaacttcagatcctgtgggtttagtatcattatcttcagctctttgataccctgtgttagagtaatagctaaaggaagttcatgtcaataaattcatacttatatcacactttcagtctc

SEQ ID NO: 353 - DNA, 1713 bp, Homo sapien
tgacaatctacaaacacttttattagcaaaaggagtaaatgcagcctgggtgacagagggagaccttgtgtctaaaaaaaaaattagaaagaaaaaaatctagtagcattttaatgtgtttaaaattacatttttgttttcattaatttaaatctgaaatttatgcttactcatgtcataataactatatcaaaagtatattctccttttgagctttcaactagagtgtttattatttgcattttctgtttggaatgtttaattattatggtcaccgtaaaaacgtctttaccccttcttggctactgctttgggaataggtgtagaaatggcaagttgtggttaaaagctgatcttctcttctctcctagatgatttgttgggtttcagtgagaatggctaatcagcattttgatagaagatttggtgatgatcattattggttactgcctcatggcagaaatagtaaatgcagctacctatcttcatgtccttgtagtaaaagacagtccaaggatgatcttctagttctgtaccctcaatgctctgtgaacggagaggagaaaatattaaaagcgtttgatctattgtgcttgaaatgtacacattctgttctaaaagatttttccccttatgttctagattgggactttaaccaggacatctgacagtgaggttccagatgtggaatctcgtgaagacttaattaaaaatcactacatggcaaggatagtggaacttacgtctcagttgcagctggctgacagtaagtcagtgcatttttatgccgagtgccgagcactgtctaaaagactggccttggctgaaaagtctaaggaagcattgacagaagaaatgaaacttgccagtcagaacatcagcagacttcaggatgagctgacaactaccaagaggagttacgaggatcagttaagtatgatgagtgaccacctgtgcagcatgaatgagacattatctaaacagagagaagagattgacacactaaagatgtccagtaaggggaattctaaaaagaacaagagtcgatagttttgaaatagctggttggcgactgttctttccagacctgctcctgctgcacagagccgcagggctgagaccacgtccatgctggctgccttcaggaagctaaagtattgttggacctagtaaactagtcagtgttggaaacggccttgaaatatttaaaacatatttgtaaccagtgaggcaaatacagaagttgatgtcggcagtaaatggaaaacaatacgtatgtcatggatattgtaggtttccttatgctgtttttactgtgcactttttaaaattaggttttaatttcagtatgtaagaacaaatattttgtatactttcaaactcaattatatggtaatcgatttggtatctatggaatagatatatgtttctggaaaaaaatgcttaaattgtcaaactgtcattacttcttattatagttgaaggcattctccagattctttttaaaagatttgttcatatttctctctctctctctctctctctctctctctctctctctcttctttctctctgagggagagggagccctccaaacttcagatcctgtgggtttagtatcattatcttcagctctttgataccctgtgttagagtaatagctaaaggaagttcatgtcaataaattcatacttatatcacactttcagtctc

SEQ ID NO: 354 - DNA, 1844 bp, Homo sapien
tgacaatctacaaacacttttattagcaaaaggagtaaatgcagcctgggtgacagagggagaccttgtgtctaaaaaaaaaattagaaagaaaaaaatctagtagcattttaatgtgtttaaaattacatttttgttttcattaatttaaatctgaaatttatgcttactcatgtcataataactatatcaaaagtatattctccttttgagctttcaactagagtgtttattatttgcattttctgtttggaatgtttaattattatggtcaccgtaaaaacgtctttaccccttcttggctactgctttgggaataggtgtagaaatggcaagttgtggttaaaagctgatcttctcttctctcctagatgatttgttgggtttcagtgagaatggctaatcagcattttgatagaagatttggtgatgatcattattggttactgcctcatggcagaaatagtaaatgcagctacctatcttcatgtccttgtagtaaaagacagtccaaggatgatcttctagttctgtaccctcaatgctctgtgaacggagaggagaaaatattaaaagcgtttgatctattgtgcttgaaatgtacacattctgttctaaaagatttttccccttatgttctagattgggactttaaccaggacatctgacagtgagcaaatgtggagccagtgttttccaccttcgtgtatggatccatgtagcttttctctggttctgttttgatggtcaccaacaaattatagcctgtttttgtaattgccttattgagtgacttgccatggagagttccagatgtggaatctcgtgaagacttaattaaaaatcactacatggcaaggatagtggaacttacgtctcagttgcagctggctgacagtaagtcagtgcatttttatgccgagtgccgagcactgtctaaaagactggccttggctgaaaagtctaaggaagcattgacagaagaaatgaaacttgccagtcagaacatcagcagacttcaggatgagctgacaactaccaagaggagttacgaggatcagttaagtatgatgagtgaccacctgtgcagcatgaatgagacattatctaaacagagagaagagattgacacactaaagatgtccagtaaggggaattctaaaaagaacaagagtcgatagttttgaaatagctggttggcgactgttctttccagacctgctcctgctgcacagagccgcagggctgagaccacgtccatgctggctgccttcaggaagctaaagtattgttggacctagtaaactagtcagtgttggaaacggccttgaaatatttaaaacatatttgtaaccagtgaggcaaatacagaagttgatgtcggcagtaaatggaaaacaatacgtatgtcatggatattgtaggtttccttatgctgtttttactgtgcactttttaaaattaggttttaatttcagtatgtaagaacaaatattttgtatactttcaaactcaattatatggtaatcgatttggtatctatggaatagatatatgtttctggaaaaaaatgcttaaattgtcaaactgtcattacttcttattatagttgaaggcattctccagattctttttaaaagatttgttcatatttctctctctctctctctctctctctctctctctctctctcttctttctctctgagggagagggagccctccaaacttcagatcctgtgggtttagtatcattatcttcagctctttgataccctgtgttagagtaatagctaaaggaagttcatgtcaataaattcatacttatatcacactttcagtctc

SEQ ID NO: 355 - DNA, 1164 bp, Homo sapien
gaaaaaaacattgatcttaagttggtagacttttttccccttactgaaatgacaaagctgggggccacttctttcttaggtgtactctgatgtgtgacacaatgcctataggtattcaacagattatttgtggaatgaatgagtagctttggctttgagaagtgtttttaacaaactttcccgaagcaaatttggttttagaaagtgctccctctagtaatggaatgttttctgattttacagtgccgagcactgtctaaaagactggccttggctgaaaagtctaaggaagcattgacagaagaaatgaaacttgccagtcagaacatcagcagacttcaggatgagctgacaactaccaagaggagttacgaggatcagttaagtatgatgagtgaccacctgtgcagcatgaatgagacattatctaaacagagagaagagattgacacactaaagatgtccagtaaggggaattctaaaaagaacaagagtcgatagttttgaaatagctggttggcgactgttctttccagacctgctcctgctgcacagagccgcagggctgagaccacgtccatgctggctgccttcaggaagctaaagtattgttggacctagtaaactagtcagtgttggaaacggccttgaaatatttaaaacatatttgtaaccagtgaggcaaatacagaagttgatgtcggcagtaaatggaaaacaatacgtatgtcatggatattgtaggtttccttatgctgtttttactgtgcactttttaaaattaggttttaatttcagtatgtaagaacaaatattttgtatactttcaaactcaattatatggtaatcgatttggtatctatggaatagatatatgtttctggaaaaaaatgcttaaattgtcaaactgtcattacttcttattatagttgaaggcattctccagattctttttaaaagatttgttcatatttctctctctctctctctctctctctctctctctctctctcttctttctctctgagggagagggagccctccaaacttcagatcctgtgggtttagtatcattatcttcagctctttgataccctgtgttagagtaatagctaaaggaagttcatgtcaataaattcatacttatatcacactttcagtctc

SEQ ID NO: 356 - DNA, 1046 bp, Homo sapien
ggctaacatttttttattcagcttcttgaaatcttagactctcttgtctttggaacaaaatgaatgtttgtagttttgataaatccaagatagttgctttcttttctttctttatttcctgtcctcagccccgagagggatagggtctgtggaagcagagaggagagagagtataacaaactgctttgcgattattgaataaaagttaacaatgcaaggttatcagctattctcctttttggaagctagtgttccaaagtgaaatatggctttcagacagcttggtttataaactatgtgagttatttttttttatgtttatgttcttattgttgatatttttctttgcacaggggaattctaaaaagaacaagagtcgatagttttgaaatagctggttggcgactgttctttccagacctgctcctgctgcacagagccgcagggctgagaccacgtccatgctggctgccttcaggaagctaaagtattgttggacctagtaaactagtcagtgttggaaacggccttgaaatatttaaaacatatttgtaaccagtgaggcaaatacagaagttgatgtcggcagtaaatggaaaacaatacgtatgtcatggatattgtaggtttccttatgctgtttttactgtgcactttttaaaattaggttttaatttcagtatgtaagaacaaatattttgtatactttcaaactcaattatatggtaatcgatttggtatctatggaatagatatatgtttctggaaaaaaatgcttaaattgtcaaactgtcattacttcttattatagttgaaggcattctccagattctttttaaaagatttgttcatatttctctctctctctctctctctctctctctctctctctctcttctttctctctgagggagagggagccctccaaacttcagatcctgtgggtttagtatcattatcttcagctctttgataccctgtgttagagtaatagctaaaggaagttcatgtcaataaattcatacttatatcacactttcagtctc

SEQ ID NO: 357 - DNA, 763 bp, Homo sapien
tgacaatctacaaacacttttattagcaaaaggagtaaatgcagcctgggtgacagagggagaccttgtgtctaaaaaaaaaattagaaagaaaaaaatctagtagcattttaatgtgtttaaaattacatttttgttttcattaatttaaatctgaaatttatgcttactcatgtcataataactatatcaaaagtatattctccttttgagctttcaactagagtgtttattatttgcattttctgtttggaatgtttaattattatggtcaccgtaaaaacgtctttaccccttcttggctactgctttgggaataggtgtagaaatggcaagttgtggttaaaagctgatcttctcttctctcctagatgatttgttgggtttcagtgagaatggctaatcagcattttgatagaagatttggtgatgatcattattggttactgcctcatggcagaaatagtaaatgcagctacctatcttcatgtccttgtagtaaaagacagtccaaggatgatcttctagttctgtaccctcaatgctctgtgaacggagaggagaaaatattaaaagcgtttgatctattgtgcttgaaatgtacacattctgttctaaaagatttttccccttatgttctagattgggactttaaccaggacatctgacagtgaggtaacatgtgcttgtcatcatgttgtttgttagtaaatatctggcagcatgtttgttgacaaagtcctgcaaaagccatctttgtcta

SEQ ID NO: 358 - DNA, 1510 bp, Homo sapien
ccaccccgggaacccggaagtggaggaggaggcgcggcggcggcggcggcggcggctgcggtggccaagcaggcagatactgcctgacccgttcccgggagcgtgtctgggtttgggggcgggagacaggctgagccgcctgggcggcctggcctgtacggggcgggggaggccatggcctcggctgagttgcaggggaagtaccagaagctggctcaggagtactcgaaggtacccatcgtggtctgggagtagggggtcccccgccctgcggcctcaggttgccgtggcagcgacttgtcgggacctaggggtactgcgggaggggcacgcgagcgcgccccacctttcccctcagccgtctccgtccaccattacggtgcctccacctgcagctcccaggagatggggccgggcggtgtctgcgtccgtgagcgtttttgcagggagaagctggagtttgattcttccttttcactgaagtagcgggcttgggactgggatgtcagaaattctggcttcttgcctctaatgctggctgagaagggaagggaaaggtgtggaccactcctcacctcgctgcttcctcaattttctcagcctagggatggggaagatcaacccttctcccctcccacagggatgatatgaggttaaagagatttatcttcccccgaatcaattcgagagggtaaatagagacattcgggtaaactgcttcactagggatgggtggttatgaatgtattcactgctttggcaagaggttgtcaggaatgattttgaaagcttgagtgctacggctctatccttttctttctcttgtccctcggtcacctagaatggggcagacacccagcgggtgctcaatacacattaagcaacatggggacctgcccctttctcgtgtttatggcatcagtcttttaaatgatataaccctttccttggaaaaggatgctgcagtttctgggtagggtgtttctagtttaagaatattttaatgaagttattaaagcagaattttacatctttggaaattgattcaacagtcattaagcttagttttcagtgactttggcattcatggagtcagtgggaagatggtaattcctttttgcaatttggagaaactgagacacattttattccttaagatttcattcgacaaatagcaagatgaaatattctttgaaaaataaaacttgtgcctaaacatacacacttaattcttcaccatcacataggagtcttttgagacactacacttatttcagtgatgctaccattagcaaaacttcgttgcatttccatttgaaattgtcttaagagcctgtggcacaatgttagtgatggcaagtgttcatcttttgaaggagtgtttccttgcttgaagggccagaagttgtttggaacaaatccatgtgatgaagggaggtgggtggaggttggatgccatatttggctctactatttttggttgaaaatgtttcatgatcaacacctgtga

SEQ ID NO: 359 - DNA, 1451 bp, Homo sapien
tggatttgaaactgtggcattacattttccctttaagccttgtctcaatcattaggttttaataatttccttctgaatcatggatttatccttccttttctaatactagttgtcaccctgttttaggtccctttcttgtcacatgtggactattacttttagtcctgaaatatttaaagatcatttgctgagtgcctagacaggtcagtagcataggggatgcaaaaattggtaagtcaaaatttctacctcaagcagtttatagcctcgtaaggcagagatagatgtagaaatgtcaataatataaactagactgtgccataaagaacctcctggggtttcagagaaggacatgttactgctggtggcatggtgtggggaagccttcccagaaaaagggtgctttgagctgggcctggatatgtgagcaggttttattgggcagagataagggtaaaatctaaggaattacgtgaagtatggtatataggagaaaaggtgtcatcatgccctcaggagcagtaatccagtatgacaggaggcttagggtgggtgggatgtgcagggcaaggacatgtaagttctgaaaggtatggtgggactggaccctagtgttctggtctaaggactgggaacttcattcataaggccatggggttgttggagaagtttttgagccagggaacatcatgttgctatatgtgtactcacaaggttaatctggcaacagagtgtagattacctaggagtgggacaagggagtcaaagactattgtgatgatagttttggcgtactattgtggaggcttagcctggattggggagatgtggaagatcttgtggaaggagagggagcagactggtcctttcaaggagacaagggagaaagaggcagtcatggggaagatggtgatgcagttgaccgaaagaaaagaggtagacaggagcaggtttatgggagagacaacgaggttaactttgttgttgtttaatcttctgacagatgggttcatatgtatctatataactgctgatgtatgcctttctaaatgaaagactagactttggcagagaaactgatgtcaacactattgggctggaggagccctcatgttgggagtggtgggtgcacagtgcagtcaggcctgtgcagggtccttggtgagttctccatcccagtgatcaggaggcagaggggagctgtggaaacggggtgaggtagaagctggagaagggagtttcaacctgatggtgcaggtcagttctgcgcattgctgtggagaggtcagagggtgatgtatcaaggcgactgggtttggtgactggattttgtggcctcgagaggactagtatactttgcgaggagcgcttctgtgcagggtgtagggggacactagattgccagcacagggagttgaggtgaatgggtgctgaggaaataggcagagcaa

SEQ ID NO: 360 - DNA, 895 bp, Homo sapien
tggatttgaaactgtggcattacattttccctttaagccttgtctcaatcattaggttttaataatttccttctgaatcatggatttatccttccttttctaatactagttgtcaccctgttttaggtccctttcttgtcacatgtggactattacttttagtcctgaaatatttaaagatcatttgctgagtgcctagacaggtcagtagcataggggatgcaaaaattggtaagtcaaaatttctacctcaagcagtttatagcctcgtaaggcagagatagatgtagaaatgtcaataatataaactagactgtgccataaagaacctcctggggtttcagagaaggacatgttactgctggtggcatggtgtggggaagccttcccagaaaaagggtgctttgagctgggcctggatatgtgagcaggttttattgggcagagataagggtaaaatctaaggaattacgtgaagtatggtatataggagaaaaggtgtcatcatgccctcaggagcagtaatccagtatgacaggaggcttagggtgggtgggatgtgcagggcaaggacatgtaagttctgaaaggtatggtgggactggaccctagtgttctggtctaaggactgggaacttcattcataaggccatggggttgttggagaagtttttgagccagggaacatcatgttgctatatgtgtactcacaaggttaatctggcaacagagtgtagattacctaggagtgggacaagggagtcaaagactattgtgatgatagttttggcgtactattgtggaggcttagcctggattggggagatgtggaagatcttgtggaaggagaggacctttcacacctgcgccgcgctcgacatgcatctagaggcca

SEQ ID NO: 361 - DNA, 602 bp, Homo sapien
tgacaatctacaaacacttttattagcaaaaggagtaaatgcagcctgggtgacagagggagaccttgtgtctaaaaaaaaaattagaaagaaaaaaatctagtagcattttaatgtgtttaaaattacatttttgttttcattaatttaaatctgaaatttatgcttactcatgtcataataactatatcaaaagtatattctccttttgagctttcaactagagtgtttattatttgcattttctgtttggaatgtttaattattatggtcaccgtaaaaacgtctttaccccttcttggctactgctttgggaataggtgtagaaatggcaagttgtggttaaaagctgatcttctcttctctcctagatgatttgttgggtttcagtgagaatggctaatcagcattttgatagaagatttggtgatgatcattattggttactgcctcatggcagaaatagtaaatgcagctacctatcttcatgtccttgtagtaaaagacagtccaaggatgatcttctagttctgtaccctcaatgtctcagagttgtatttttaagagtgaaattattatatttatgtaattatggatatatt

SEQ ID NO: 362 - DNA, 1574 bp, Homo sapien
ccaccccgggaacccggaagtggaggaggaggcgcggcggcggcggcggcggcggctgcggtggccaagcaggcagatactgcctgacccgttcccgggagcgtgtctgggtttgggggcgggagacaggctgagccgcctgggcggcctggcctgtacggggcgggggaggccatggcctcggctgagttgcaggggaagtaccagaagctggctcaggagtactcgaagcttcgggctcagaatcaggttctgaaaaaaggtgttgtggatgaacaagcaaattctgcagctttaaaggagcaactgaaaatgaaggatcagtcattgagaaaactacaacaggaaatggacagtttgacatttcgaaatctgcagcttgccaagagggtagaactacttcaagatgaactagctctaagtgaaccacgaggcaagaaaaacaagaaaagtggagaatcttcttctcagttgagtcaagagcagaagagtgtctttgatgaagatctgcaaaagaagatagaagagaatgaacggttgcatatacaattttttgaagctgatgagcagcacaagcatgtggaagcagagctgaggagtcgactggccactctggagacagaagcagcccagcaccaagctgtggttgacggtctcacccggaagtacatggaaaccattgagaagctgcagaacgacaaggctaaactagaagtgaaatctcagactctagaaaaggaagccaaggaatgtcgacttcgaacggaagaatgtcaattacagttaaagactcttcatgaagatttgtcaggtagattagaggaatccttatcaatcatcaatgaaaaagtaccttttaatgatacaagtaggtattatgtacagttttccattatttgtaactttgaatctctctgtggtagccaactaattaaagtaatttttaatcttttgggcaaaaaatttaattggccccacagaagattgctttctctttgttcatttgatcagccgtggtaatcatatttaacaggaagattttaaattgtcatataactactctaaagctggtcttcttggaagaagcccaaatccacattttttgattgcatgtatttagcattttccaaggtaaaaaacaacctgcacataaatagttgaatatttgtacaagaaaaattgttgattggggtgggggaaatgaggcttggtggtgggagttaaatcatcttaaaattatgacttaccccttggtcaattcccagcaatagctacgaagctaacttggttaagccttgcttcctattcaccctgggaatggtttgataatttacattcccaggaacaacaaaaagttaaaaaatactactttacatgtgtaataggtgccaaatttgcaacctttaggtaagaagtcaaaacctcaaaagcaaagaaaatatttgcttgtttggattttgaaacttacattcaaattgatgcacatttcctttttctgtaatcacatgattgaaattaatattttacttcccctaaatttgtttagggaagacctaaaaaaagaggaagaaaaa

SEQ ID NO: 363 - DNA, 932 bp, Homo sapien
tcggtacccccattccattcccgcttagggtgggtgggatgtgcagggcaaggacatgtaagttctgaaaggtatggtgggactggaccctagtgttctggtctaaggactgggaacttcattcataaggccatggggttgttggagaagtttttgagccagggaacatcatgttgctatatgtgtactcacaaggttaatctggcaacagagtgtagattacctaggagtgggacaagggagtcaaagactattgtgatgatagttttggcgtactattgtggaggcttagcctggattggggagatgtggaagatcttgtggaaggagagggagcagactggtcctttcaaggagacaagggagaaagaggcagtcatggggaagatggtgatgcagttgaccgaaagaaaagaggtagacaggagcaggtttatgggagagacaacgaggttaactttgttgttgtttaatcttctgacagatgggttcatatgtatctatataactgctgatgtatgcctttctaaatgaaagactagactttggcagagaaactgatgtcaacactattgggctggaggagccctcatgttgggagtggtgggtgcacagtgcagtcaggcctgtgcagggtccttggtgagttctccatcccagtgatcaggaggcagaggggagctgtggaaacggggtgaggtagaagctggagaagggagtttcaacctgatggtgcaggtcagttctgcgcattgctgtggagaggtcagagggtgatgtatcaaggcgactgggtttggtgactggattttgtggcctcgagaggactagtatactttgcgaggagcgcttctgtgcagggtgtagggggacactagattgccagcacagggagttgaggtgaatgggtgctgaggaaataggcagagcaa

SEQ ID NO: 364 - DNA, 1029 bp, Homo sapien
tggctcccaaaatgtgggattacaggcgtcagccacgtgctcggccattgaacctttttgagtttgtacagcccttgttgccttcaacagtgctccagagacccttctaggcagtctttgtgtgatcttctagacaaaatgtccttaaaggacatgtttgggtgtgtacggtaggcctctgggtggtgtgccataacctacctctgtgtctacactccagaatcatcattgaactcaccaatactggtgttcctactggactttgttagaaacacatacatggcagtttccttgtccagtgcttcctggagagggatctcagaactagatcctggaaggggactttggtggggacagtaggggagtggtatattgtggctgtagagcctccatagtttagtgctacttctttcattctctatcagctcccaccacccacttatccaacataaacagataatggcacagtctcagctaatcttttttttcttttcttttctgaattgttggaagaaacacattacagatttttttgttcattgtagccttctccactaccaacatatagatgtgcctttccttccaccctattctgacacttaacccaagccttttccccctaggcatgaggagccctggcacagcccagggggccatgatgattgggaccccacaatgtggccatcatggttatatgaggtttcaaaggaagagaagaccaggctataccaatgtgcaacaaaatgaagcagagcctcctttcatagggtcaccccaaaaccagaggaggcctctagaagtgctagttgcagaaccacagagtgtggttgactctcttattcaccactgtgtctttagagcagaagttggcaaactggcccacaggccaaatcctacctgccatctgcttttgtagaaccttccagttaactgtttatatttttaaatggttggaaaaatcagaaagatatttcatgacatgtaaaaatgtatatgaaacttaaatttcaatgtctataaagttttatt

SEQ ID NO: 365 - DNA, 1065 bp, Homo sapien
tctaatcatctcgagcggcgcagtgtgctaggaaacattctccgcccattcatacacgcttgatttgtacttccacacaacaatacgagcattttgagtttgtacagcccttgttgccttcaacagtgctccagagacccttctaggcagtctttgtgtgatcttctagacaaaatgtccttaaaggacatgtttgggtgtgtacggtaggcctctgggtggtgtgccacaacctacctctgtgtctacactccagaatcatcattgaactcaccaatactggtgttcctactggactttgttagaaacacatacatggcagtttccttgtccagtgcttcctggagagggatctcagaactagatcctggaaggggactttggtggggacagtaggggagtggtatattgtggctgtagagcctccatagtttagtgctacttctttcattctctatcagctcccaccacccacttatccaacataaacagataatggcacagtctcagctaatcttttttttcttttcttttctgaattgttggaagaaacacattacagatttttttgttcattgtagccttctccactaccaacatatagatgtgcctttccttccaccctattctgacacttaacccaagccttttccccctaggcatgaggagccctggcacagcccagggggccatgatgattgggaccccacaatgtggccatcatggttatatgaggtttcaaaggaagagaagaccaggctataccaatgtgcaacaaaatgaagcagagcctcctttcatagggtcaccccaaaaccagaggaggcctctagaagtgctagttgcagaaccacagagtgtggttgactctcttattcaccactgtgtctttagagcagaagttggcaaactggcccacaggccaaatcctacctgccatctgcttttgtagaaccttccagttaactgtttatatttttaaatggttggaaaaatcagaaagatatttcatgacatgtaaaaatgtatatgaaacttaaatttcaatgtctataaagttttatt

SEQ ID NO: 366 - DNA, 1033 bp, Homo sapien
tggcctcccaaaatgttgggattacaggcgtcagccacgtgctcggcccattgaacctttttgagtttgtacagcccttgttgccttcaacagtgctccagagacccttctaggcagtctttgtgtgatcttctagacaaaatgtccttaaaggacatgtttgggtgtgtacggtaggcctctgggtggtgtgccacaacctacctctgtgtctacactccagaatcatcattgaactcaccaatactggtgttcctactggactttgttagaaacacatacatggcagtttccttgtccagtgcttcctggagagggatctcagaactagatcctggaaggggactttggtggggacagtaggggagtggtatattgtggctgtagagcctccatagtttagtgctacttctttcattctctatcagctcccaccacccacttatccaacataaacagataatggcacagtctcagctaatcttttttttcttttcttttctgaattgttggaagaaacaattacagattttttgtgttcattgtagccttctccactaccaacatatagatgtgcctttccttccaccctattctgacacttaacccaagccttttccccctaggcatgaggagcccctggcacagcccagggggccatgatgattgggaccccacaatgtggccatcatggttatatgaggtttcaaaggaagagaagaccaggctataccaatgtgcaacaaaatgaagcagagcctcctttcatagggtcaccccaaaaccagaggaggcctctagaagtgctagttgcagaaccacagagtgtggttgactctcttattcaccactgtgtctttagagcagaagttggcaaactggcccacaggccaaatcctacctgccatctgcttttgtagaaccttccagttaactgtttatatttttaaatggttggaaaaatcagaaagatatttcatgacatgtaaaaatgtatatgaaacttaaatttcaatgtctataaagttttatt

SEQ ID NO: 367 - DNA, 1066 bp, Homo sapien
tctaatcatctcgagcggcgcagtgtgctaggaaacattctccgcccattcatacacgcttgatttgtacttccacacaacaatacgagctttttgagtttgtacagcccttgttgccttcaacagtgctccagagacccttctaggcagtctttgtgtgatcttctagacaaaatgtccttaaaggacatgtttgggtgtgtacggtaggcctctgggtggtgtgccacaacctacctctgtgtctacactccagaatcatcattgaactcaccaatactggtgttcctactggactttgttagaaacacatacatggcagtttccttgtccagtgcttcctggagagggatctcagaactagatcctggaaggggactttggtggggacagtaggggagtggtatattgtggctgtagagcctccatagtttagtgctacttctttcattctctatcagctcccaccacccacttatccaacataaacagataatggcacagtctcagctaatcttttttttcttttcttttctgaattgttggaagaaacaattacagattttttgtgttcattgtagccttctccactaccaacatatagatgtgcctttccttccaccctattctgacacttaacccaagccttttccccctaggcatgaggagcccctggcacagcccagggggccatgatgattgggaccccacaatgtggccatcatggttatatgaggtttcaaaggaagagaagaccaggctataccaatgtgcaacaaaatgaagcagagcctcctttcatagggtcaccccaaaaccagaggaggcctctagaagtgctagttgcagaaccacagagtgtggttgactctcttattcaccactgtgtctttagagcagaagttggcaaactggcccacaggccaaatcctacctgccatctgcttttgtagaaccttccagttaactgtttatatttttaaatggttggaaaaatcagaaagatatttcatgacatgtaaaaatgtatatgaaacttaaatttcaatgtctataaagttttatt

SEQ ID NO: 368 - DNA, 468 bp, Homo sapien
  misc_feature (112)..(112): n=a,c,g or t
  misc_feature (132)..(159): n=a,c,g or t
cgatcaatagcactattttatttattagtattcaattttatatagaaggtactgagtatattatttattggctaattgtttggctgacaggctggcagggataaaaataggntagatggatgggatagatgnnnnnnnnnnnnnnnnnnnnnnnnnnnngggtaatatttattaaaagtgccagtgcattgcatagttctaaactgtttcaccttactcacctgggaattttttctacagaaatatacttctaagtttataattaaaatcagaaaaataagagttactttacagatgttttatatatcccataaagtcagcactacttatagtacttttttgcataaagttttttaagtaagagtttgcttttgtctttgtaggaaatcatcagaaagaatgaaatgctcttactagtatctataaaactgttattcaactgatattagagaggaagcatgttttcaa

SEQ ID NO: 369 - DNA, 255 bp, Homo sapien
aaaagtgccagtgcattgcatagttctaaactgtttcaccttactcacctgggaattttttctacagaaatatacttctaagtttataattaaaatcagaaaaataagagttactttacagatgttttatatatcccataaagtcagcactacttatagtacttttttgcataaagttttttaagtaagagtttgcttttgtctttgtaggaaatcatcagaaagaatgaaatgctcttactagtatctataaaa

SEQ ID NO: 370 - DNA, 380 bp, Homo sapien
aatgcacatgtgtatccgtatagttattgttttatattaactttataaattctgttgacttggcttataatagttttatgatttttactatatcggtaggactatatatatattatcatttgtgacagaataatgtgaagttaagtaattactaaactctaaatggaaatagtattcaagaaactcaagcactgaacttgaatataagagtattgttgctttaatccagtgtatttgtttatggaaagaaaaacacaaaggcagactcgaataaaaaggaacattaaaatattctttaaaactctgtattactactattttggaatttacccgtttataggctccaaaaataaattttcaaataaaatatttttatgaag

SEQ ID NO: 371 - DNA, 388 bp, Homo sapien
aatgcacatgtgtatccgtatagttattgttttatattaactttataaattctgttgacttggcttataatagttttatgatttttactatatcggtaggactatatatatattatcatttgtgacagaataatgtgaagttaagtaattactaaactctaaatggaaatagtattcaagaaactcaagcactgaacttgaatataagagtattgttgctttaatccagtgtatttgtttatggaaagaaaaacacaaaggcagactcgaataaaaaggaacattaaaatattctttaaaactctgtattactactattttggaatttacccgtttataggctccaaaaataaattttcaaataaaatatttttatgaagaaaaaagt

SEQ ID NO: 372 - DNA, 489 bp, Homo sapien
gctgcttttaagttttctgtctttggatttcaacagaatgattgtaatatatctaggtgtacatgtctttgcgtataatctacttgggtttcttaacgctttgtggatacgtaaattgatgcttccatgaactttggaaagtcttcatccatcactcctcaaatattttttcattctctcttcttttgagtatctcattacacatgtgttggcaagtttgatgttatctcaaagatctttgagactctgtttattgttctttaatagttttcatttagttcttttgactgaataattttactcttttctttccccaaatcaaagctgcactgaattcctctagtgaatattttattttggttattgtaattttcaaatctgacattttcattttttctcttacataatgcttatctgctacatgtgaatctccatttattgttatcttgtttttctttaattctttaagcatgattcttttatttcttg

SEQ ID NO: 373 - DNA, 504 bp, Homo sapien
ttttttttttttttgctgcttttaagttttctgtctttggatttcaacagaatgattgtaatatatctaggtgtacatgtctttgcgtataatctacttgggtttcttaacgctttgtggatacgtaaattgatgcttccatgaactttggaaagtcttcatccatcactcctcaaatattttttcattctctcttcttttgagtatctcattacacatgtgttggcaagtttgatgttatctcaaagatctttgagactctgtttattgttctttaatagttttcatttagttcttttgactgaataattttactcttttctttccccaaatcaaagctgcactgaattcctctagtgaatattttattttggttattgtaattttcaaatctgacattttcattttttctcttacataatgcttatctgctacatgtgaatctccatttattgttatcttgtttttctttaattctttaagcatgattcttttatttctttg

SEQ ID NO: 374 - DNA, 416 bp, Homo sapien
tgggattgttctgtgccactcacacagaagattgaagctcagggctagccagaataaatgtaaagattactaattagaaaaattcctcctcttcctgtgtataagtggtaggtgagggttagactagaaattttcctgccagtttgtttacttctgcactgtgaggtaagattggttctctttatggacacttgagggtgaagaattaaatggttcctaccaccaggtatttagcagccatgaaaattcttataacagtgacactgtaacaccatggaaaattattttgacattattttaaacatttttgcaaaactgtatgtaaactgttattatgaaaatatgcatatgaataaaatttttatattctagtggtaggataattttttaatcaaataaagcacactaagaccctg

SEQ ID NO: 375 - DNA, 416 bp, Homo sapien; identical to SEQ ID NO: 374

SEQ ID NO: 376 - DNA, 1759 bp, Homo sapien
ctgagaagcagagagaacaggtgtaaatgaatgcccgagaatgtttccgatctgtttcatagctgaacgtggagagttagatgtcgatcttccttccaccttcttctttagtcaagtaggttgagagcaccagggatcattttttcttcaaccttttagctcagtgatacccagagcaatgtgcctactcagtggagaagatagtatttgtgtgaataaatttactgttctgtgtgttacatgtctagttaggagtggtcctctaattctgtaggaatgaatcagatggttgtagccccttctgtttcttgaattatcctttgattcttctcagcttgaccatgaaattcatctttttcttattcttactgcctttcagatgtagttactctagagtagggcatgtaggtagggtcttagtaaaaggagaggaattatagatgtggcctttttcaaacccccaatgcatataggcatgtaaatcctactcataaatgcctgcaacaacctagatgtggattgcatatttattatggtaataatgtttagttctaaatttttcagtcacgaatctcttacatattgatatgtctgaaataagatgttttcttaggatttcataagcacttttctatattttacatgtggttgtctagattttagcatggtatccctatacatagtaactaataactagtagtcatttggtgggggtacctttgagaaaacagtaaaattaacagtaaacaataacattaagattaaatatattaacatcctattgatgttaattagtattggtgtaaagggtgtcagtgtattcatcagctgctctctccgccatagttaatatgctgctctctcagccatagttaatataggtcataatcttattgctcactgtgtgcgaggtggtgtaagttaaactgcccaaacaaatagatccaaaatgtaatgacatggcttaatatgacaaaaatgtatttcttgcttttgtaacactccaaggcaggtgttcaggttggctaggatgctcttcacatagcttataagggacacaggggaagagcttctcagcatctctcaagtgagctagaaaggaaggggaagagcatgaaggagcaagaatgggaagatgggatgacccaagcctggaagtttctcctatgatgacttttgactaaaatctggacttaaactattttaagcagcttggctacatttcccagcctcctttagaagcaaaagtttttaacagttgatcctggttatctcatgaatatacatttgagatattttctcatttgcatcttttttaatgactttaaaaatatcaccaaagcagctgcaataactgatttatctagcgtcaggggaaatgaatctttccagcatacttgaattttttgggtatcagaagcttacagttttaattgtcagaactttatattttccaaaatttttccatagtactctctggcttaaaacaaaatataatcttatttattgatgactcttgttcaactatatgtgcctcagtaattgtattgaaccagaatacactgactctttacatatccaagtttgtagaggagtttatttcaagttatgtgattacttagatttgttattctttccactggtcttctgctccaatgaattagttataactttttgaaggtaaggtctttctcttgcttctgagtctcttaaagtgcctgaaagtagtgccttgaatggccataatctggcaagctta

SEQ ID NO: 377 - DNA, 1642 bp, Homo sapien
tggtcctctaattctgtaggaatgaatcagatggttgtagccccttctgtttcttgaattatcctttgattcttctcagcttgaccatgaaattcatctttttcttattcttactgcctttcagatgtagttactctagagtagggcatgtaggtagggtcttagtaaaaggagaggaattatagatgtggcctttttcaaacccccaatgcatataggcatgtaaatcctactcataaatgcctgcaacaacctagatgtggattgcatatttattatggtaataatgtttagttctaaatttttcagtcacgaatctcttacatattgatatgtctgaaataagatgttttcttaggatttcataagcacttttctatattttacatgtggttgtctagattttagcatggtatccctatacatagtaactaataactagtagtcatttggtgggggtacctttgagaaaacagtaaaattaacagtaaacaataacattaagattaaatatattaacatcctattgatgttaattagtattggtgtaaagggtgtcagtgtattcatcagctgctctctccgccatagttaatatgctgctctctcagccatagttaatataggtcataatcttattgctcactgtgtgcgaggtggtgtaagttaaactgcccaaacaaatagatccaaaatgtaatgacatggcttaatatgacaaaaatgtatttcttgcttttgtaacactccaaggcaggtgttcaggttggctaggatgctcttcacatagcttataagggacacaggggaagagcttctcagcatctctcaagtgagctagaaaggaaggggaagagcatgaaggagcaagaatgggaagatgggatgacccaagcctggaagtttctcctatgatgacttttgactaaaatctggacttaaactattttaagcagcttggctacatttcccagcctcctttagaagcaaaagtttttaacagttgatcctggttatctcatgaatatacatttgagatattttctcatttgcatcttttgtaatgactttaaaaatatcaccaaagcagctgcaataactgatttatctagcgtcaggggaaatgaatctttccagcatacttgaattttttgggtatcagaagcttacagttttaattgtcagaactttatattttccaaaatttttccatagtactctctggcttaaaacaaaatataatcttatttattgatgactcttgttcaactatatgtgcctcagtaattgtattgaaccagaatacactgactctttacatatccaagtttgtagaggagtttatttcaagttatgtgattacttagatttgttattctttccactggtcttctgctccaatgaattagttataactttttgaaggtaaggtctttctcttgcttctgagtctcttaaagtgcctgaaagtagtgccttgaatggccataatctggcaagcttactttgatcattttttttgtttttattggcttttttattggtaattctgttgtgctgtttgtgacagtgattctcaaatttcagtctaccagaatcacctagaggcttgttaaactccagcatttgcgtggttccatcc

SEQ ID NO: 378 - DNA, 626 bp, Homo sapien
  misc_feature (391)..(391): n=a,c,g or t
aaaaactactggctttaagcaataagcattttttcatcccacagttctgtgggctttgctgcgtactctggtcttgctaggaatcccttgcgtgtgtgcggtcagcttgcagtctggtaaggggtctctgccctggggcttggcctttggctaaccgaaggcgctgggcatgacctggcctccttcttggctttcctcaggctgctgggcttgttcctgacactaacagtggatgtttccaaggcctctggaggcccgtttgtgtctctacagtttgttggccaaaacaagacccaaggccagctaacattcaaggggtaagaaaataaacttttaccccttggcggaggtgtcaaagtcatttgaaagggcctggatacagggagggtcnagccctgggaacatgtctgcacacagagtgtgtgatccgggtctgcgcgtggccggcagcccatagacctttcccaaattagtacctggcaggtgcccagctggtgctgggctgggtatggggaggggcggagaagtcgggttcataaggaacaactgtcatcattcagaaagcttttcgaagtgtccgctgtgtgcccagtctaccgacccaggtatcgtcagtcctggttctt

SEQ ID NO: 379 - DNA, 388 bp, Homo sapien
aaaaactactggctttaagcaataagcattttttcatcccacagttctgtgggctttgctgcgtactctggtcttgctaggaatcccttgcgtgtgtgcggtcagcttgcagtctggtaaggggtctctgccctggggcttggcctttggctaaccgaaggcgctgggcatgacctggcctccttcttggctttcctcaggctgctgggcttgttcctgacactaacagtggatgtttccaaggcctctggaggcccgtttgtgtctctacagtttgttggccaaaacaagacccaaggccagctaacattcaaggggtaagaaaataaactttaccccttggcggaggtgtcaaagtcattgcaaagggcctggatacagggagggt

SEQ ID NO: 380 - DNA, 1343 bp, Homo sapien
  misc_feature (814)..(918): n=a,c,g or t
aattattttctaatgagttttgggagcaggggttgggttttgtatttcttgtcacatctaatgacaatttatgttgactggtcgaaggtgttttaactttcttattattaatgagaacttcagagaaaaattctgagagatggaaaactaggctaaaaatacgtgtttgtgggggtgccctgtctagcaagttaattttatatgagatgatttaaaactctgaggactcaaataaacctataaaagtgaccttttattgatttggtttacttttcagttctttacaattcagttctttatgatggggaaagactggctagaccagccttttatgtaagaatgtaccaaattgaattgttattcttagtttttctggcatatttagaagtaactcacctttggaggaaagttcagtgtgtcattgaccaaacacatagtttggactgacccaatgttgtggatgactcaggacacctgtgactttgtaaaatttctttcgccccctttcctttttagttgtaacagttagttataacagttagtttgggaggtacatggtaacagaggaaaatagccatattttctatttttcttgaaattcttacttgttcaaagtctaatttgctttactttgcctaatttctttctcaccttgcttgattttgcctgcttttaaaaaaatatcaagacagtttcttcattttataatagcttttattcatcatgtttttattctgaatttaaaacctgctgtgttactgatcaaaaatgctttcagaggctgggtgcagtggctcacacctgtaatcccagnnnnnnnnnnnnnnnnnnnnnnnnnnnnnnnnnnnnnnnnnnnnnnnnnnnnnnnnnnnnnnnnnnnnnnnnnnnnnnnnnnnnnnnnnnnnnnnnnnnnnnnnntagaaaccttttattgtaaatattctccctggttgctatagtctttcatatctattatttcagttgcctcataaaattacacctgtcagtagattacattttatttgactattcccctattattgaatatttagatatatttcaatttttctgtgctttgaacatcttaatgtgtatggctttttttcttctttgtaattctgtctctaggacaaattcccaggagtgggattaccagaccaaagagcatgaatgtttttatggattgtgactgccaaaaggactgcaaaaattttcaacaccacaatgacgtatgagttgttccagttcccttgcagcgctagcattggactttagaagaaatctctttagatgattaaacattattttgatatttttcatttctttgattactcatgtgattg

SEQ ID NO: 381 - DNA, 986 bp, Homo sapien
taaattattttctaatgagttttgggagcaggggttgggttttgtatttcttgtcacatctaatgacaatttatgttgactggtcgaaggtgttttaactttcttattattaatgagaacttcagagaaaaattctgagagatggaaaactaggctaaaaatacgtgtttgtgggggtgccctgtctagcaagttaattttatatgagatgatttaaaactctgaggactcaaataaacctataaaagtgaccttttattgatttggtttacttttcagttctttacaattcagttctttatgatggggaaagactggctagaccagccttttatgtaagaatgtaccaaattgaattgttattcttagtttttctggcatatttagaagtaactcacctttggaggaaagttcagtgtgtcattgaccaaacacatagtttggactgacccaatgttgtggatgactcaggacacctgtgactttgtaaaatttcattcgccccctttcctttttagttgtaacagttagttataacagttagtttgggaggtacatggtaacagaggaaaatagccatattttctatttttcttgaaattcttacttgttcaaagtctaatttgctttactttgcctaatttctttctcaccttgcttgattttgcctgcttttaaaaaaatatcaagacagtttcttcattttataatagcttttattcatcatgtttttattctgaatttaaaacctgctgtgttactgatcaaaaatgctttcagaggctgggtgcagtggctcacacctgtaatcccagcactttgggaggccaaggtgggcagatcacttgaggtcaagagttcaagactagcctggccaacatggcaaaaccccgtctactaaaaatacaaaaaattagctgggcatggtgttgcatgcctgtagtcccagctacttgggaggctgaggcacaagaatcacttgaacc

SEQ ID NO: 382 - DNA, 305 bp, Homo sapien
  misc_feature (61)..(137): n=a,c,g or t
gtataacttacagatggtaaacaatatacagcttgatgtattctgacatgtaatgcagtannnnnnnnnnnnnnnnnnnnnnnnnnnnnnnnnnnnnnnnnnnnnnnnnnnnnnnnnnnnnnnnnnnnnnnnnnnnnattgcctcaaaagggaaaccatatttggatttctatcaccataaataacctttgcctgccttgagcctcgtataaatggagcatatagcatgtatgcctttatgtctagttttttctgtgcaacatatttttaatattcactggtcttgttgcatgtgtcagacattt

SEQ ID NO: 383 - DNA, 616 bp, Homo sapien
  misc_feature (23)..(23): n=a,c,g or t
  misc_feature (82)..(82): n=a,c,g or t
cacgttattggtttcccatactngagtacttcacttagtatatcgtctccagctcgatccacgttgtgtgtatgcatttatntgtcactttttatcgctgatagtattccatgtgtatatatatcacatttctttatccactcattcgttgatgcgcatttagccttgttccatatttttgtatgcagtataacttacagatggtaaacaatatacagcttgatgtattctgacatgtaatgcagtatgtaaccaccacctggatcaagatatggagcatttctggcacttcagaaggttccttcatatctttttccaatcaatattgcctcaaaagggaaaccatatttggatttctatcaccataaataacctttgcctgccttgagcctcgtataaatggagcatatagcatgtatgcctttatgtctagttttttctgtgcaacatatttttaatattcactggtcttgttgcatgtgtcagacatttatttctttttattgctgtgtaatattctagtatttgcttatccatccatatgttgagggacatttgtttccagtttttggatatcataaataaagctgctgtgcacattgttaaaaaaaaaaaa

SEQ ID NO: 384 - DNA, 448 bp, Homo sapien
ccttgttccatatttttgtatgcagtataacttacagatggtaaacaatatacagcttgatgtattctgacatgtaatgcagtatgtaaccaccacctggatcaagatatggagcatttctggcacttcagaaggttccttcatatctttttccaatcaatattgcctcaaaagggaaaccatatttggatttctatcaccataaataacctttgcctgccttgagcctcgtataaatggagcatatagcatgtatgcctttatgtctagttttttctgtgcaacatatttttaatattcactggtcttgttgcatgtgtcagacatttatttctttttattgctgtgtaatattctagtatttgcttatccatccatatgttgagggacatttgtttccagtttttggatatcataaataaagctgctgtgcacattgttatacatg

SEQ ID NO: 385 - DNA, 2508 bp, Homo sapien
ctgagccgctgcccagggtgaccgttctgcgggaggtgatgttcgctctgggaaggggctgtagctgccctttggaaggaaggtttggggtgtaagaggcgttcagattctcggtctggtgtgccccaaattcagatgtgaaaatagatcatggggatgcaatcccagggcactgtatttctcacttccttgggtccctggcacgcgactcccagctaacacccaaccacacacatttctacatactgtttcttaattttgttttgggatatttaatctaagcggtcagcaagacttcttataaaagctggtctacgtacactgagatcaaaccccacaatcccatggtgtttctgctcctgccctagcaagcctgggtcgacttgtcccggggcagccgcggcagcgcagcgtggacgggcccggacacccggtgcctgcccagccagcgacagctgaaggcacatttcaagagggaaatagttcagtcctcggtaatttgtcaacctcgtgctggctttaaaattctcctcccaccttctagtcctgactgagggggcccaaagcaaactcccccggggcttaaacgctcggattcctgagaaacggcaagtgagaaaggagttgcagttgtacgaagaaggagcgaggaaaaggtgtttgtggagggagccccggatctgtcttcctacctgttagccgagaacaaaagggggctggcgtttcccgaaggcgaaagggcgcagacagccactttctctgctaaacaaactgcagtcctgggcagaacaagaaaattactcacgcagggggagcaaggggagcacagagaaacagaacctagattatgcggaaggcatcttaatttaattaactccttgggaaggcagaggcgctctgaaggggcaggaacttcgcagccgtttctctattcacctgatacagtctggccctaacaatctgtcctttaacaattttttttctttttaatgatcttctttgatctacttagtctatagctctctaatttatataaaattctgctgtggtttgggctgaaattcagtgagcctacctatccgaccatcagtcatttatctcatataccagtgcacaggttttagcagatgaaccctgactgtatattatttttagataattcagtgtaatattaccattaccaaagagcgaaactccttatcaagttacttcttaatttttttctccaatgttttgaaagcttcactgaactgaaataagtgtgtacacatcttccttggtgacagccagtcaagtaaattttacaaaatttctccacatgcctggaaattcctgtgaagaagactgatgaaagaaaagtagcctcagctccaccaacatatttatgacttttcattggtttaagtttctttccttgcaagattaaaagtaaccagtggtctgaaacgggacggtggagaaatgacagcagatgatgatcgctgttatttcctgaaagggagtgtgggaactacaaggctcagctctagacaaaacgaaagtactttaggatctctgcattcacttaaaatacttcttttgacatacatttccagcaactcaatgggagtgtggaaatttaaccttcctaattatttgtggcaagagccattggtggatatttaaggttgttctgtttgtaaaagggtttcaaaaggaccaatggtttgctcttcctctatgaagaaactatctgccctacaaattaaaacaaacaggtactatgaaatagcactttttttttttactaacatgaacctgaattatattagtcgttaatttctgtattataaaccattcagagaaaagggaaagaagatggcactcaactttgtggcagtgtaacctttatggcagagttcgctgtgcctttggtatagaaatcacaggtcacaacagtactttagccaacaccactcccccacatgcccgctcccccctccccaacgcatacaccctgtggtgggagttgtgctttgcctcctgtatttatttctaagaaatctagtctgggaatacacccaaataataatttcggtttcctctctatgggaaagaggttgcttttcaacacgaagggaaaaataatattttgaatctctggaaaatcctcattacgcaaagagaaggaaataaaggtataaattattatttttaattgaaagggaaataatcaggtagattaccaggaatgttagtagaatccttttcccctgcctccctaagagacttgccaccgagcaaaaatgaatcgtgatttgtggtgggaaagttgattactaatgggggtttgcagttgcggttgaatggtctgactgagaccctctgactgttacccacctctcattaactcttagcctgaactcccagaccgcataccaccaagcagaagcgattcgttaataaatctctgtcccgagcccttccaaggaaaggtgtgggccccgcagaggcagcccagatcctgcc

SEQ ID NO: 386 - DNA, 2857 bp, Homo sapien
gggacggagctcggcgtgcttgctgctggagggtgatggccctgcaaggactgtgggctccgacctcaccgggagtcgacagctgagaggttcgccgaagagcgaggttctgggacgagcgctgaacgccggccccaagcaccccgggtctttacacagtccgagtccacagactctgacgaagacgtggatctgatctcgcttatagactgctcgcggtcctccagatcatgtccgcgactcctgacgactccgcgcggaaaaaaaagttggccaggcgtggactcaatgacctttccaagctgtgcgcctcgctgcctggaccgggtctgagcgctgctgcccagggtgaccgttctgcgggaggtgatgttcgctctgggaaggggctgtagctgccctttggaaggaaggtttggggtgtaagaggcgttcagattctcggtctggtgtgccccaaattcagatgtgaaaatagatcatggggatgcaatcccagggcactgtatttctcacttccttgggtccctggcacgcgactcccagctaacacccaaccacacacatttctacatactgtttcttaattttgttttgggatatttaatctaagcggtcagcaagacttcttataaaagctggtctacgtacactgagatcaaaccccacaatcccatggtgtttctgctcctgccctagcaagcctgggtcgacttgtcccggggcagccgcggcagcgcagcgtggacgggcccggacacccggtgcctgcccagccagcgacagctgaaggcacatttcaagagggaaatagttcagtcctcggtaatttgtcaacctcgtgctggctttaaaattctcctcccaccttctagtcctgactgagggggcccaaagcaaactcccccggggcttaaacgctcggattcctgagaaacggcaagtgagaaaggagttgcagttgtacgaagaaggagcgaggaaaaggtgtttgtggagggagccccggatctgtcttcctacctgttagccgagaacaaaagggggctggcgtttcccgaaggcgaaagggcgcagacagccactttctctgctaaacaaactgcagtcctgggcagaacaagaaaattactcacgcagggggagcaaggggagcacagagaaacagaacctagattatgcggaaggcatcttaatttaattaactccttgggaaggcagaggcgctctgaaggggcaggaacttcgcagccgtttctctattcacctgatacagtctggccctaacaatctgtcctttaacaattttttttctttttaatgatcttctttgatctacttagtctatagctctctaatttatataaaattctgctgtggtttgggctgaaattcagtgagcctacctatccgaccatcagtcatttatctcatataccagtgcacaggttttagcagatgaaccctgactgtatattatttttagataattcagtgtaatattaccattaccaaagagcgaaactccttatcaagttacttcttaatttttttctccaatgttttgaaagcttcactgaactgaaataagtgtgtacacatcttccttggtgacagccagtcaagtaaattttacaaaatttctccacatgcctggaaattcctgtgaagaagactgatgaaagaaaagtagcctcagctccaccaacatatttatgacttttcattggtttaagtttctttccttgcaagattaaaagtaaccagtggtctgaaacgggacggtggagaaatgacagcagatgatgatcgctgttatttcctgaaagggagtgtgggaactacaaggctcagctctagacaaaacgaaagtactttaggatctctgcattcacttaaaatacttcttttgacatacatttccagcaactcaatgggagtgtggaaatttaaccttcctaattatttgtggcaagagccattggtggatatttaaggttgttctgtttgtaaaagggtttcaaaaggaccaatggtttgctcttcctctatgaagaaactatctgccctacaaattaaaacaaacaggtactatgaaatagcactttttttttttactaacatgaacctgaattatattagtcgttaatttctgtattataaaccattcagagaaaagggaaagaagatggcactcaactttgtggcagtgtaacctttatggcagagttcgctgtgcctttggtatagaaatcacaggtcacaacagtactttagccaacaccactcccccacatgcccgctcccccctccccaacgcatacaccctgtggtgggagttgtgctttgcctcctgtatttatttctaagaaatctagtctgggaatacacccaaataataatttcggtttcctctctatgggaaagaggttgcttttcaacacgaagggaaaaataatattttgaatctctggaaaatcctcattacgcaaagagaaggaaataaaggtataaattattatttttaattgaaagggaaataatcaggtagattaccaggaatgttagtagaatccttttcccctgcctccctaagagacttgccaccgagcaaaaatgaatcgtgatttgtggtgggaaagttgattactaatgggggtttgcagttgcggttgaatggtctgactgagaccctctgactgttacccacctctcattaactcttagcctgaactcccagaccgcataccaccaagcagaagcgattcgttaataaatctctgtcccgagcccttccaaggaaaggtgtgggccccgcagaggcagcccagatcctgccttgccagagcgccctcgt

SEQ ID NO: 387 - DNA, 1730 bp, Homo sapien
ggaaacctcgagcaaacctgtgcctttaagactcagttgctatccaaacagaagtaaacagagtggaccattagcagacgccgggcgcggaggcggagccagggcgctgagggccccgcgcggcggcgggacgcccgcccgaaggggaggcggggccgctactaaagcccaagactcccggcctggggcagcctggggagggacgcgggcggggacggagctcggcgtgcttgctgctggagggtgatggccctgcaaggctgtgggctccgacctcaccgggagtcgacagcgagaggttcgccgaagagcgaggttctgggcgagcgctgaacgccggccccaagcaccccgggtctttacacagtccgcgtccacagactctgacgaagacgtggatctgctctcgctttagctgctcgcggtcctccagatcatgtccgcgactcctgcgactccgcgcggaaaaaaaagtttgccaggcgtggactcaatgacctttccaagctgtgcgcctcgctgcctggaccgggtctgagcgcggctgcccaggttgacctttctgcgggagggctttctctacgtgctgttgtctcactgggtttttgtcggagccccacgccctccggcctctgattcctggaagaaagggttggtcccctcagcacccccagcatcccggaaaatggggagcaaggctctgccagcgcccatcccgctccacccgtcgctgcagctcaccaattactccttcctgcaggccgtgaacaccttcccggccacggtggaccacctgcagggcctgtacggtctcagcgcggtacagaccatgcacatgaaccactggacgctggggtatcccaatgtgcacgagatcacccgctccaccatcacggagatggcggcggcgcagggcctcgtggacgcgcgcttccccttcccggccctgccttttaccacccacctattccaccccaagcagggggccattgcccacgtcctcccagccctgcacaaggaccggccccgttttgactttgccaatttggcggtggctgccacgcaagaggatccgcctaagatgggagacctgagcaagctgagcccaggactgggtagccccatctcgggcctcagtaaattgactccggacagaaagccctctcgaggaaggttgccctccaaaacgaaaaaagagtttatctgcaagttttgcggcagacactttaccaaatcctacaatttgctcatccatgagaggacccacacggacgagaggccgtacacgtgtgacatctgccacaaggccttccggaggcaagatcacctgcgggatcacagatacatccattccaaagaaaaacccttcaaatgtcaggagtgtgggaaaggattttgtcagtctagaactctagcagttcacaaaactttacacatgcagagccgcacctgcagctccagggagttaactcttcttctgggggactgagaactgtagaaagccacacactactacatcccttcacaaagagtatatgctagtttcttgtagatattcacagctcattttagagctctgtacataatgttgtgggtctttgttttgttgttttgtttgctttgggatcttgttggatgcacttagatatggaaaatggaagccaaattttatctttaaagactgtattttcaaaataaaactttttcttgtttgtttcaaaaaaaaaaaa

SEQ ID NO: 388 - DNA, 410 bp, Homo sapien
ccagttacaagttgtatatgaacacagatcaagattagagaaatccttgcaaaaagaaagacttgaacataaaaaagcaaaggaagattttcttgtttataagttagaagcacaagaaacattaaataaaggaaggcaagattccaatagcagatacagtgcactgaatgtccaacatcagatgttgaaaagccaacacgaggagctaaagaaacagcacagtgacttggaagaggaacatcgcaaacaaggggaagacttcagtagaacatttaatgaccataagcaaaaatacttgctttgggatcttgttggatgcacttagatatggaaaatggaagccaaattttatctttaaagactgtattttcaaaataaaactttttcttgtttgtttcaaaaaaaaaaaa

SEQ ID NO: 389 - DNA, 1264 bp, Homo sapien
gagtttaaatgcattttatttttagacaacctacatgacatgtttttcttaaaaacaatgccttcactccaaatcccacggaacaccttcccggccacggtggaccacctgcagggcctgtacggtctcagcgcggtacagaccatgcacatgaaccactggacgctggggtatcccaatgtgcacgagatcacccgctccaccatcacggagatggcggcggcgcagggcctcgtggacgcgcgcttccccttcccggccctgccttttaccacccacctattccaccccaagcagggggccattgcccacgtcctcccagccctgcacaaggaccggccccgttttgactttgccaatttggcggtggctgccacgcaagaggatccgcctaagatgggagacctgagcaagctgagcccaggactgggtagccccatctcgggcctcagtaaattgactccggacagaaagccctctcgaggaaggttgccctccaaaacgaaaaaagagtttatctgcaagttttgcggcagacactttaccaaatcctacaatttgctcatccatgagaggacccacacggacgagaggccgtacacgtgtgacatctgccacaaggccttccggaggcaagatcacctgcgggatcacagatacatccattccaaagaaaaacccttcaaatgtcaggagtgtgggaaaggattttgtcagtctagaactctagcagttcacaaaactttacacatgcagacatcaagccctacagctgcgagcagtgcggcaaagtgttcaggcgaaactgtgatctgcggcggcacagcctgactcacaccccgcggcaggacttctagagaagcccaggatctgtcccgtgccgccgctgctcccctccccagacacctctccacgtctcctacccagggggtcgcatccctagcccttcactgaccccagctcttcccttgctgcagccgcacctgcagctccagggagttaactcttcttctgggggactgagaactgtagaaagccacacactactacatcccttcacaaagagtatatgctagtttcttgtagatattcacagctcattttagagctctgtacataatgttgtgggtctttgttttgttgttttgtttgctttgggatcttgttggatgcacttagatatggaaaatggaagccaaattttatctttaaagactgtattttcaaaataaaactttttcttgtttgtttcaaaaaaaaaaaa

SEQ ID NO: 390 - DNA, 1425 bp, Homo sapien
cagagcctcagtttccttgtctataagttgggagtaatattaatactatcatttttccaaggattgatgtgaacattaatgaggtgaaatgacagatgtgtatcatggttcctaataaacatccaaaatatagtacttactattgtcattattattacttgtttgaagctaaagacctcacaatagaatcccatccagcccaccagacagagctctgagttttctagtttggaagagctattaaataacaacgtctagtgtcaattctatacttgttatggtcaagtactgggctcagcattttacattcattgtctctttaagttctagcaatgtgaagcaggaactatgattatattgactacataaatgaagaaattgaggctcagatacattaagtaattctcccagggtcacacagctaggaaaaactggcaaagccctgggattgatccatgatcttccagcattgaagaatcataaatgtaaataactgcaaggccttttcctcagaagagctcctggtgcttgcaccaacccactagcacttgttctctacaggggaacatctgtgggcctgggaatcactgcacgtcgcaagagatgttgcttctgatgaattattgttcctgtcagtggtgtgaaggcaaaaaaaaaaaaaatggttggaaattatggcttgctagcaaatgatgtcagacattctggttaatagagtaggaagggtcttacagatggagaaatgaagacccacggacatctcctgatgcacaaacttctcacaagtgacctggaggggcttggttctaatcttgtccctggactgcaccaactggggcactgacattctatgtggtcctctattaccattgggctggtcctgtcttccaggaaccagggcctctcccactgcaaccagaatggcctcagattctagggttagcattgacccagtaactacataaaaaagtggaatagattaaatagaacctcagacaaatcacagaaatggggctaaacctagccagcctgagcttcagatttaaaagttctctttctttataccagggaaatcaaaacctggatgttgtcttctctttttcttctggctttgacatagttaacaagccctaggatgtctgcactggaaaaatgggagatctcatttagtccaaactcctcctctgttaagagacctggaataaagccactattaatcaactattagtttggtgactattagtcaaagccaggaccagagccagaagctggactttcctttcccctggccaaaccttgtgtgcacactgtttcttcccctccccaccctgtcaggccattgatgtgatggctccccattcacaccttcatttctcctctttaacgtgaccagggctgttctgaacctccttactttggcatccc

SEQ ID NO: 391 - DNA, 493 bp, Homo sapien
  misc_feature (451)..(451): n=a,c,g or t
ataaatttgcatcttcttgaaatgggctccaagaagcaggtttgtggccagtagagccagctcagaacccaggagtggtacaaaaagcattcagatatcaagattcccctcctggctgcatcttccatgggggaggccatgaaaggggcccctggtgaaccattgagtcatttataggctaatcttagtacactccctgaagtagggaatgacatgggctgcaagaattcttcctaagcaccccagagagaacttcaccgatttaaaatatgagtttctgtaacctgagcaggagcttgcctggtgcaagggcttatgcagcctgcctgccaggaggccagagggtcgcacttatgagcttgagcaaatggggcttttgggaatcagcagcctccctgagctttcctggagcgagctgaactgaccctgaacttggagggcttgctggcangcttttgatgtctcctgatattgcagtttcaacatgagaggg

SEQ ID NO: 392 - DNA, 493 bp, Homo sapien; identical to SEQ ID NO: 391
  misc_feature (451)..(451): n=a,c,g or t

SEQ ID NO: 393 - DNA, 1003 bp, Homo sapien
agttctggacagactgggacaagctggttcccttatctggaagtgagaataaaacataagctactaagagtgctgtgactttaaactgtaaaatcaaaataagtggcaaaccagtggtttgtgggtaggatgtgagtctctggcgagtttctttttaactgcatggagttcctaaggcattttacacagattgcatttgaaatgccagagttgttgcatagaaagttggacctcgggctttcaaaaaatagaaagagcaggtcttggaaggctacagtcccagcaagggtgatggctcctttcgtaattctcagttcctgctggccaaccttattcattagaccatgggcttggctcttggagacagtcaatgttttccgtagagaatattaccccgcagtggccaggaagcaaatgccaatagatctccaaaatatttgatcataccaatggattgcctagaatatcctgtggtctttctgttgcctttgagagaacgtcatggaataccaggtgggggtggggcaggtgagctcagggtagcaaggattctgacatagcaaagggaaattctgtatgggacagactcaaaggtcccagatgccctctcaaatgaagatggcaatattccaaatattcattgatccataagcatctcacggcaggtataagatctgggagaactcatcttattccatccccaggaaacaaacatcccttcttgggcaatgtctccaggccacgcttctcatccgcagagcaggtgcctgttctccccgggccatctgacaggggagatagaaaatctgcaagagaaagctcacagcacggggctgagccctggaggggaagcacagaggcctgtattctaattcactgatgatcaatttgccaagttctttttctcttagttcccttagtttccttccaggtaatgcagaattccttgaagcttctctaggttgtttactttgcaatctttggtcagaaggtctttctcatg

SEQ ID NO: 394 - DNA, 1003 bp, Homo sapien
agttctggacagactgggacaagctggttcccttatctggaagtgagaataaaacataagctactaagagtgctgtgactttaaactgtaaaatcaaaataagtggcaaaccagtggtttgtgggtaggatgtgagtctctggcgagtttctttttaactgcatggagttcctaaggcattttacacagattgcatttgaaatgccagagttgttgcatagaaagttggacctcgggctttcaaaaaatagaaagagcaggtcttggaaggctacagtcccagcaagggtgatggctcctttcgtaattctcagttcctgctggccaaccttattcattagaccatgggcttggctcttggagacagtcaatgttttccgtagagaatattaccccgcagtggccaggaagcaaatgccaatagatctccaaaatatttgatcataccaatggattgcctagaatatcctgtggtctttctgttgcctttgagagaacgtcatggaataccaggtgggggtggggcaggtgagctcagggtagcaaggattctgacatagcaaagggaaattctgtatgggacagactcaaaggtcccagatgccctctcaaatgaagatggcaatattccaaatattcattgatccataagcatctcacggcaggtataagatctgggagaactcatcttattccatccccaggaaacaaacatcccttcttgggcaatgtctccaggccacgcttctcatccgcagagcaggtgcctgttctccccgggccatctgacaggggagatagaaaatctgcaagagaaagctcacagcacggggctgagccctggaggggaagcacagaggcctgtattctaattcactgatgatcaatttgcaagttctttttctcttagttcccttagtttccttccaggtaatgcagaattccttgaagcttctctaggttgttttactttgcaatctttggtcagaaggtctttctcatg

SEQ ID NO: 395 - DNA, 111 bp, Homo sapien
taaaagtccatttgtttatttctggcatatagaaaagtgattgacttttgtgtattagccatgcattctgcaaccttacatatcagtaaccttgcatgtcagttcccaaaa

SEQ ID NO: 396 - DNA, 111 bp, Homo sapien; identical to SEQ ID NO: 395

SEQ ID NO: 397 - DNA, 898 bp, Homo sapien
  misc_feature (277)..(277): n=a,c,g or t
  misc_feature (292)..(292): n=a,c,g or t
agcgcttctaacccgctggaatctcagctgaaacaggagcaggtcagatattctccctcactctcccccttgctttgcgtccagatgcacctgtgctagggtgagcaactgtgcgtgttggcgagttccacgctcactcccccgggtgtttttaacctccaatgcgcttctcagccccagggctctgattttaacttctcacttttctgcagagtagctctcgccagggccaccaaagtgcagtggatagacaatgggcaactttggcctgtctttnacctccggttttttnatttcttccctcttacttgaaatgtttccctcactgcattcccttctgttgcttctcaagtctcatggtttctctccctgccgtgagctgtcctagggaagactatctgctcacctaggtgttggccgctccctgtgctccatcctgtcttctctccctagggcaccgcacgcacacctacgtggcttgcattccacgagacatgttgacccccagcttgatcttcaggttcgacctctatgttccagacctagagagccaactctttactgcatccaccaccgatatgttccttgccattgtacatgtccatgtctgcatctccatcttctctgccctctgctccttcttattttccttgaatgaggtcagcatccacccaactggcaaggtaagaaataggacacttattttctcacagctcctctctctgtaagcaatgctacagtccatctgagtccaccgcctaaggggctgccaatctttccttatttccacttcaggcgttccttcctgggctgtggtattacctctcaataccgcttctttatccaccctcacttctcaccagtctcttctgttctgtaattgggattttttatttat

SEQ ID NO: 398 - DNA, 541 bp, Homo sapien
ttcccttctgttgcttctcaagtctcatggtttctctccctgccgtgagctgtcctagggaagactatctgctcacctaggtgttggccgctccctgtgctccatcctgtcttctctccctagggcaccgcacgcacacctacgtggcttgcattccacgagacatgttgacccccagcttgatcttcaggttcgacctctatgttccagacctagagagccaactctttactgcatccaccaccgatatgttccttgccattgtacatgtccatgtctgcatctccatcttctctgccctctgctccttcttattttccttgaatgaggtcagcatccacccaactggcaaggtaagaaataggacacttattttctcacagctcctctctctgtaagcaatgctacagtccatctgagtccaccgcctaaggggctgccaatctttccttatttccacttcaggcgttccttcctgggctgtggtattacctctcaataccgcttctttatccaccctcacttctcaccagtctcttct

SEQ ID NO: 399 - DNA, 848 bp, Homo sapien
  misc_feature (315)..(333): n=a,c,g or t
tgggtgctcaattagacagctctaattattttgcaaatttattgactaaacttagagaagaattaacaagctttgctttgggccttggtctttccccattttcgcatcttattcctctcacagttgactaatcaccattaatgctaaccctttaaaaatgcacagaaggggggaaaaactatttctcatcttttaaatgagtattgaaacaactgtgtatatcttttaggaatctcaatccatactaaatataaaaggcactgcacatttgtgtaggagtggctggtaaagtcttcagcttgaaactgctttccnnnnnnnnnnnnnnnnnnnaaataaggttgggaggataaaggtaccatgaaattatccttaatcagccatggtgatgcagcccaattgagcattggtgattggccctgaaatatctggcttgcacttcacagggagtaaagcaaactgatgtcattggttccccatttatgtgttttatttgcagctcaccagttggtgtactcactgaagaaatcattaagttttttgtacaaatgccttacctatcgctgtagcacaccaaagattactttttaaaaaaatcaaatatcattcccactttgagaattccatgttttaattgaataggaccaaaaccagttcaatgcatttttgctaaatattgtgaaaggcatttttttccttgttattatttaaccatcacttacatctacattgatctactgagtttttctttcatttaggcagtaatggataccagatgaacatcagtttgacctgttcactgctgaagggcagacaatacatttctacctagtgaccttatcttgata

SEQ ID NO: 400 - DNA, 872 bp, Homo sapien
  misc_feature (315)..(333): n=a,c,g or t
tgggtgctcaattagacagctctaattattttgcaaatttattgactaaacttagagaagaattaacaagctttgctttgggccttggtctttccccattttcgcatcttattcctctcacagttgactaatcaccattaatgctaaccctttaaaaatgcacagaaggggggaaaaactatttctcatcttttaaatgagtattgaaacaactgtgtatatcttttaggaatctcaatccatactaaatataaaaggcactgcacatttgtgtaggagtggctggtaaagtcttcagcttgaaactgctttccnnnnnnnnnnnnnnnnnnnaaataaggttgggaggataaaggtaccatgaaattatccttaatcagccatggtgatgcagcccaattgagcattggtgattggccctgaaatatctggcttgcacttcacagggagtaaagcaaactgatgtcattggttccccatttatgtgttttatttgcagctcaccagttggtgtactcactgaagaaatcattaagttttttgtacaaatgccttacctatcgctgtagcacaccaaagattactttttaaaaaaatcaaatatcattcccactttgagaattccatgttttaattgaataggaccaaaaccagttcaatgcatttttgctaaatattgtgaaaggcatttttttccttgttattatttaaccatcacttacatctacattgatctactgagtttttctttcatttaggcagtaatggataccagatgaacatcagtttgacctgttcactgctgaagggcagacaatacatttctacctagtgaccttatcttgattccttaatctagtcactctaacctt

SEQ ID NO: 401 - DNA, 519 bp, Homo sapien
aggtaccatgaaattatccttaatcagccatggtgatgcagcccaattgagcattggtgattggccctgaaatatctggcttgcacttcacagggagtaaagcaaactgatgtcattggttccccatttatgtgttttatttgcagctcaccagttggtgtactcactgaagaaatcattaagttttttgtacaaatgccttacctatcgctgtagcacaccaaagattactttttaaaaaaatcaaatatcattcccactttgagaattccatgttttaattgaataggaccaaaaccagttcaatgcatttttgctaaatattgtgaaaggcatttttttccttgttattatttaaccatcacttacatctacattgatctactgagtttttctttcatttaggcagtaatggataccagatgaacatcagtttgacctgttcactgctgaagggcagacaatacatttctacctagtgaccttatcttgatttttttttttagtttctcttacctt

SEQ ID NO: 402 - DNA, 718 bp, Homo sapien
tgtttgtacaatgtgcgcataaatgttaaaccaaccctttagcgcacaatgatgaatggtttgggggagtttatggtctaaaagtggccctatgtgattttttttctaagttactcccactacttccatcttctcactcacttgaaacgttaaagattggaaatcacagatgggctgtcagtaattaatgacataattaactagcatttttggagggctacaaggtaggggaggttgttaattctgccctggccaacacctgggtcttctgattttattaaaaatcaggtggcagcaaaattttcccaaggaaccaaatatttgtaccacaatattataggttttctccgaatttcttctggtgacagcattttttttcttttgacaacttatggtgtgtacagacctaaattcatcaaagataaatattgaacagtataactgtcaatgcaaaggaggcaaagactagtgatttaggcttagagatagacatcccgagttctgttgttctccttcgtggtccctgacttccatctcatatgggagcttatgccattttgtagttgtctcttcaaggataccatagattatgtctgctaaaagtatactctttcctgcactagtatctgttaaaggtataattatttattgccattcgttcatcaggcagtacttttccagttttctctttcccgcacccattctttgaggaacacca

SEQ ID NO: 403 - DNA, 482 bp, Homo sapien
tgtttgtacaatgtgcgcataaatgttaaaccaaccctttagcgcacaatgatgaatggtttgggggagtttatggtctaaaagtggccctatgtgattttttttctaagttactcccactacttccatcttctcactcacttgaaacgttaaagattggaaatcacagatgggctgtcagtaattaatgacataattaactagcatttttggagggctacaaggtaggggaggttgttaattctgccctggccaacacctgggtcttctgattttattaaaaatcaggtggcagcaaaattttcccaaggaaccaaatatttgtaccacaatattataggttttctccgaatttcttctggcacattttttttcttttgacaactatggtgtgtacagacctaaattcatcaaagataaatattacagtataactgtcaatgcaaaggaggcaaagactatgatttaggctaaagatagca

SEQ ID NO: 404 - DNA, 182 bp, Homo sapien
agacttcagcaagtctcaagagttgggtttaattcaacttctaagtggtgtattaaataaaatccccagagactcatgggccctaaacatggtctgtgttagcatcagaatctgcctctcttcaaatctgagtgatttactatacttttggggatttgtaaaataaatatgtgattctccct

SEQ ID NO: 405 - DNA, 2291 bp, Homo sapien
ttaataaaaggtccatgtgtccatgtgccatttccatgtgtcaccaactaggagagtccaaaggttcacataggtatgaattcaccatttgagagccataaaagcggccactcccaagttcttcccatgctctcatgttgtatatccgtgaaggtatttagtgcaaggccctgggggtggactagtaacaaggtatatagcacatgtccgaggacaaattggagctacaagacaatgccgtcattagctctttgtccttttaaattatacttattcaggtagttactgcctggttacaaagaagtaattaaaaaaaaaatgtgccaaataaagccctggggtccatataaaaaacactttaaaagatggccgggggcaggatagacttcagcaagtctcaagagttgggtttaattcaacttctaagtggtgtattaaataaaatccccagagactcatgggccctaaacatggtctgtgttagcatcagaatctgcctctcttcaaatctgagtgatttactatacttttggggatttgtaaaataaatatgtgattctccctacatgtatcactggagttgcttcaaacacaaagaacattgccctgggaaatggaaaaagtaccagggaaaagaatgttgctttgacaatattcaacacaatacgattagctacagaagtaggccaaaaacaaggtttcttcattgtcggtagaaactgcttataaagaacttggtgggaaatcaatgcttccatatcctcccttttcaggtcattttattcctgttctattgctcagtttacaggaaattctgataacaaagaacactaatgtctcctaacctttttacccactgagttgccatattccaagcggaggatttctgtgtgcctaagattgaatgtgttcaccccaagcatactgcagcttcttacaccattttttcatatctgaatagagtctgtcaggaaggtgatggatgaatcttactgggagactaatcttactgagagacttttaagtaagatctataaactctctttgatatgtttagaaaatatgttgcagaaaattactggtgattaattaaagcagcaagaaaaaaaacaggaaaacccagaaatttaaactttggatatatctttttactaatcataaatgtacagatataattaaatatataataccatatattgtgaaacaatgaccaaaatgactctatgaaacataattcctaatggactactctattttccttttattaagacggacctaatagaattggataacccaatggacaaagtagttagtacctatatttaagtacagttttagattctgttaccaggatgttctcaacagcatacaagaaaattatggtcatatctggtaagttctcagtggatatgctggacaccattaaaatttgtaagacagtattttgtacaggactactgagtacttatttgcagtttggatgactctacagagcatgttcaatacgttgaatcagtctctaacaattatggaaggtttcctgagtggtgaactcaagatgccaccggagaaaaagaagaaacagaaaacagcttagctcctgcttcaagaaactcaatcagtagtgaaaaataacaaaattgcatatataaaggaaataagtaaataaacataaaattgagagcaagtttatacattgccaaatagcaattgaagcagcatgaagtcaagcctagggttctcttacaaacagatattcttaagtcaggctctgaagaagagaaatgtttgttgtggtagagagtggaacagacattattcagggaggaatgagatgtaaaagataaaaagtgaaaataagcacagcacatgcagattggcttgagcagaatgaagaatctgtttcagagatcagcaagaggcaatggttacagtcattataggagaataactaaagatttagaagccatgcagagaacatgaagatctttcaatatgaaatattcttagtcacaacagcttcatgatgttaacatcctctctagcattaacatttttatttcatcatcctaaaattatactgacaataatatctgaaagaaacaaaacagaagaggcactaaggaaggaaggccagccagaatgatggcaatgttcaagtttgatgttggccagaattagaataatagttattcaaccagaaaaggtaggatgatgaatcagacattaagaggaaatattttcctcatggataaaaacccaacaactggtaagaataaagatttctacag

SEQ ID NO: 406 - DNA, 421 bp, Homo sapien
  misc_feature (334)..(334): n=a,c,g or t
taaattccttcttttcatgtgtttgaattagtagcatcaaaatattaaaagattattatccaaagagtgctgcatccctatctcaatagacaaaattacaaagcctagggctaaacttacatattgtatattaaagaaaatcattcacaaaagaatctaaatggagtgtgagtgcactaagaacacccagggaagatatatacatacatggaagtaaatatatatgtgtatgtatgatatgtacatacataatcacacatatatgactatacatgtatacagatacatgtgtgtgcatggaaagagcaaataataatgtaaccatgtatcacgnatctattcctcatcttcttccaatgaataaaggtttataacgaattttgttttatctatatccctatcacttaaccctatcttacat

SEQ ID NO: 407 - DNA, 1689 bp, Homo sapien
  misc_feature (357)..(410): n=a,c,g or t
gtggctgcaggggctgggccattggaaatggggtagacgcaggccaccgagaatgggcagcaggaggagggcaggcaccccaggcaggtgggccagcccgggcaaaggtgtggccccaagaaggcaggccttctgctcccagtgcggccagggtgctggcggccaagaggcttggaccacagtcgggcaattggtgatgaagtcggggcgggggcccaggagaaccggcatgttgggcccaggaagcagccctcttactggcggctgatacttactgcgcacctaagtatgcaccaggtgccgttcattgtactttatggctcttcactccactgcatccacacagcaacccgtgcnnnnnnnnnnnnnnnnnnnnnnnnnnnnnnnnnnnnnnnnnnnnnnnnnnnnnntgaacgaatcacttcctgatgccctgtgtttggccatggggagagctgggggttggatccaggcaggacagcgccaggattccttttaaccgctaagctactccgctgagtgtttactgaattggattcgactcctgggagcccgatggtgcaaggggcctgcccagaccctcactgcttcctccagcctctctgacgcctgaccttgcccatctgcccacctccctgcctctgccccaggggagaccgagaatagctgggcccctcttgctcccgaaagacagagccaccccgggttagcggcgagacccctccagacggtgcccgtcgccgactgaccctcagaggctctccagcacgcggcgggcatcaatgaggccccggggattgaatgaggcactattgagaagcggctaaataccagccgcattgtgcttcctgatccagggcttcgctttttgtccaagagccttggaaacggagccccggttcacttcccctcccctgggcgccgcccgccatcctggctcatgtcaggaaacaccaggctcttgaaaatcagtaattgagagaaacatctgctggttaccaaggagcacgaggtgcttgccgagtggcgagggcatacgtgcgtcactgtcggccggttggaaacacacatgtgagtgcatgcaggcacacacgtgcgcgtgcgagagtctttctggtatgttattaagatttaaaaaattagaagtgttatgcctgttataaaaatgcaaacaatttacgaatacaataaaagtaaaagggatagccccttcatctagaagaagtcatcatgaacaatttaattttttatcctcatttttgctataaaaatggatccatattttatttaccattccagtttcattatttctgccccacaataattgccagtggctctcccacagctccgcccctcgagggcaggagagctgatccccagccagtcggccccttgagcctctgcagctggaccgtgagctcccatctaggtctgtcttctgatggatgtttctggtttcttgagttttctcaccatttctctttcttcctcttttcgtaccagttgtgattctataaattgaatttacctgctcagtatcagtcactccagatcgttaataaacgtgcgcctgacatccttgacgcattcaccatgcttgcccggtcagcatgcatgctttgccatgtcatgatgcctgctttgccatgtcatgatgatcaccatttattatgcacttgctgtgtacca

SEQ ID NO: 408 - DNA, 1060 bp, Homo sapien
  misc_feature (491)..(633): n=a,c,g or t
atcagctttgcaccctccctctgagagtcctgccagggcaagctgcttgcatctgctcctcggcgtgctccttactccgcacactcctcactctcagccatgtgcgtgaaaggaagaatgcaggctactgctcaggagtggacttgagccacggacggtgtccttgacagaaatgctttccattttataggacaatgaaatatacgttagacttccagaggtccagtttcttaactttatttgttattggttcctgttttgagaataaagcatctattcagtctgatatcttggcttctcagaaatttaatttttcaccctctcttttcttactgggttttgtcttccataaaagcaatcatctgaagcactgtgcatgccaagctccatgcaacttctcttttttaatctaacacagtatgtcttttgtacctttgcttagacctgggattttcagccttgtcactattgacattttagacattttagannnnnnnnnnnnnnnnnnnnnnnnnnnnnnnnnnnnnnnnnnnnnnnnnnnnnnnnnnnnnnnnnnnnnnnnnnnnnnnnnnnnnnnnnnnnnnnnnnnnnnnnnnnnnnnnnnnnnnnnnnnnnnnnnnnnnnnnnnnnnnnttgtgtgtgggtgggtgtctttgtgctcacatgcatgcaatattatccctagctgagagccactggctcttgctgttttcaccccctggaatgtcctccttgcctcatctctgccctcattccctgcctgccatactcttactcatccttcaagaccagatgtgagaaatctttcccaatcccccaaaacaggtcaatgtcacattctcatgtgctctcaggatacatggacatttattcataacagagaatttatcatattcatattcctcaccaacctatggaatcctcaaaggcagatagcctgttcagaggtagatccaggttctctggtgctttgaacctcataatgcttgggggcaaccacctttaagaaaaagaatgtaaatcatgaatgcagaataaaatgcaaggctttggaagggga

SEQ ID NO: 409 - DNA, 1326 bp, Homo sapien
catctcccgtctctcggatcaggcggaggtcgtggcgcaggtacttctgcaggtgtttctctgtggcagggtaaaccacggtcgtctttacatctgcaatgatacagcacagcccgtgacagggaagcaatgcccactctctatgccacaggcaccacggtgaggagagaactcccaccctggctttgattccctgagggaagccaaaatccaagaggatcatgcacccaagatccactcccacagagtgccttgtgccactgcattcacgagctgagccacactcagaatctggaaaacacaaggttcttacctgtgggtcactgggcccctcatcaggcaaaccccagcccttcctgctccatcttccaggcacaggaatgagaggtctctaactcttctcacataccaaatttctaggtatgtggctttctggacccaaagctgaaaatatggcttaaaggccgggcgcagatggctgacgcctgtaatcccagacagagagttctatatgctcactccccagagctgtcggggcagggagccaggaggttcaagaaagagcaagggcaactctctccctccgagagtttacagtcttatcgcatgtatgcaagtagctctactgtaagacacaaaataatcccagtgcaggaggaaggaaagactctagctacctggatgaacccaggaaggcctcctggaagagaaggcagaggatcaggtctagaaaaaaggtagaatttggagaaagggtattcaggtagaggaaacagagcaaagactcggaggcaagaatgtatagggcatagaatgtatacggaaggggagaggaagcaacttgatttgtttggagtcaaggcccatgaaggggtggagtggggtctgaaggctgacaaatgcagggacacggatggggtcagctggaaaggtcgaagttgggcccaagaagacaggaactttctactgggtgaagcagccaggatcggacttcctagcccaacctgtgcttgctaagcccttcagccccatcaggctgcccatgggtgacagtctcccctgctccggagcctctcctctcactgcgctcccttctatcagcaacaccctgcttctccttaccccctcctccaggaaaccttcccagaccagtcacttgggcttccccatctctccttctcagtgcacttggggccaccctgggcacgcacactataggtgcctggacctgaggtgacaaggccattcagccggcacttactgtagggcacttcaaacacacataccagccttcctgtgatgttagataatcatcctctctgtgcc

SEQ ID NO: 410 - DNA, 2336 bp, Homo sapien
tggcctttccttgactgtcaggtgggaatagtaactcctacctgctaatgtcttggcaggtactaagtactcaaatcaggaggctttaaatgtgagaagcacagaagtcagagttcaatggctcttgcagcttggagggaaaataaaagctaacatttatttcagaaaaaaatataaccaatataaggaatcagattccttctcagcctggcttctacataacatggcccctgtgacaggaaaataaatcttggggccccagaaatcactaagctaaagggaaaactcaagctgggaactgcttagggcaaacctgcctcccactctattcaaagttatctctctgctcactgagataaatgcatatctgattgcctcctttggaggggctaatcagaaactcaaaagaatgcaactgtttgtgtcttatctacccctgacctcgaagctccctccccacttccagtcttcccgcctttgcttccggttgtcccacctttccggaccaaaccaatgtatgccttatgtgtatttgattgatgtctcatgtctccctaaaatgtataaaaccaagctgtaccccaaccaccttgggcacatgtcatcaggacctcctgagggctgtgtcacggtcctgtactctgacctatcaagaggctttggctgccagtggaaaatgcagggcaccatgtggggaagaatgcagactccggagtcctgccagcaggacgtcaagtcagtatactgagacactggatttgcagcagagaaagatgtttgatcatgaggtcgcagaacaaagagatgggaaaagacctcaaatccatctccctgatgagtttggggctagggtctttaagggctttggagtgggccaaagtatggagattgttgattggttaaagagtacagggaactacaggcaaccatcaggtgatgttcaggcagttgttaatttctcaaataataagtggttgcagccagcactgggaaaggcagtctcccaactgatagaaacacctgaaactgctgatcagcagcttcccaataagatctcaggaattggaatgaagccacggaccctcgcggtgttacagttcttaaagatggtgtgtctggagtttgttccttcagatgctcagatgtgtccagagtttcttccttctggtgggttcgtggtctcactgacttcaggagtgaagctgcagactttcacagtgaatgttacagctcataaaggtagtgtggacccaaagcgagtgaagctgaagaccttggcagtgagtgttacagctcttaaggctgcgtgtctggagttgttccttcttcctggtgggttcgtggtctttgctggcttcaggagtgaagctgcagacctttgtgccgagggagccggctccggccttggccagcccagaaaggggcccccacagtgcagcggcgggctgaagggctcctcaagtgccgccaaagtgggagcccaggcagaggaggcgctgagagcgagcaagggctgcgaggactgccagcacgctgtcacctctcattatcagtctttccactacggaggaaaaatacaacaatcctttacttaccatacttatatagaaaaatcctgttatggaaccttgatcgaggaatgtgttgaatcggggaaaagtaagcagtggctttgcttcaccacaattggacaatggggagtaaaaactcaagtgctagaggatacaaagagagaacagattatagccaaaacaaaagccaacaactcccctccaaaatcacccgtggcatttccatccctttatacaaaactacaagcagacgtatcgcttcccaaggcaggaaaaaacctgtttgtagatctaggagaacgcatcgcccttaccatgaatgtgtccaattgccaggcaggcaacaccctcggagtccctgtgtatgataacctaaccagagaaaaacgatccttggaggtagaagggagccaaagatggcaagaggacgagtggcgtctgcaacacatcatcgaatattacggtcctgccacttgggctgaggatggttcatggggttattgcacttccacatataggctaaatagaacaattagactaccagctgttctaaagataatcactaaccaaaccgcctcagccctagaaatgctctcgcaacaaaaccaaatgcttgcggcaatttttcaaaacaggctaccactagactacttattagcagaagaaggtggggtctatgctagccaaagaattgaaagcagcattattcacaatagccaaaagggggaaaaaaccctacgggtccatcaacagatgaatggataa

SEQ ID NO: 411 - DNA, 735 bp, Homo sapien
  misc_feature (366)..(457): n=a,c,g or t
gatcaagatgggcaactgatggtcagactccagtggttcttcaaaactttctaggaggtaaacaagatgaaagggaaagcacacaaatttgctggaatttggaaaacacgaaccctggaatttggaggagtcacttccactggaaaatacttttatattatttatagtggctaccattaccgtgctcactttacaggtgaggttcagagatttatgtaacatgccaaaggtcacacagctggacacagcagaaccaagattcaaatctgcacaggacatcttgaaaagactatctatctgtaaacctaggatagagggcccttttctagactactgaatcttctggctaccttgcttttggtacannnnnnnnnnnnnnnnnnnnnnnnnnnnnnnnnnnnnnnnnnnnnnnnnnnnnnnnnnnnnnnnnnnnnnnnnnnnnnnnnnnnnnnnnnnngtacagtagggtttgtaaaattatgtgaattttttgtttggcatttaacgatatgttttgaaataagaaaatgataacatgaaaataagactcagtctcaaacctaatggaactagacacaaggaagagaagtaggtaggctgaaagggtgacatttagtctcaattggacacacaaagtgtgcagatgtgagtctaatttgaagtaaaatgacagaattaataactatatataagtggtggataaatagttcatgattacatcacaagtgcatcatg

SEQ ID NO: 412 - DNA, 3400 bp, Homo sapien
gtttgatcaagggttgtgcccttaactgccataccatcctgcctcacagatctgggttagggattctgctcagtcacttagtagatgtgaatcctttgggaaggtacttacacactttgagcttcagtctctgcatctataaaaccatggacacatgcatgagtacttgtagcatttcctttggtcttggtttcaagtagcttctggtccctttttgggaaatgcaggacctcatgacagcacatcattgtgtttctcctctgtcccccaactcactagatctggcaccactctttctacaatgagcttcgtgttgcccctgaagagcatcccaccctgctcacggaggcacccctgaaccccaaggccaaccgggagaaaatgactcaagtaagtatgctaccccagcacacaacactgtggggtctggggaaacttctgttagaaggaggctatgcagcacagcagagagaaggccggagctaggagtccaccaacagactaacagccttcagtgaactcagggatcccaaaggacaggaacagcttgaaagtacttgcatccttcctgcagggaccagccctttgcctccaaaagcaataggaaatttaaaagatttcactgagaaggggccacgtttaagttataatgtctaaggagaagtcacttcaaaatgcagcatcacatacaataggaatttgggttccagagtcagacatatctaggtttgaaaactggatctgccacttatcagttatgtgaccttaaagaactccgttaatttctcagagcctcagtttccttgtctataagttgggagtaatattaatactatcatttttccaaggattgatgtgaacattaatgaggtgaaatgacagatgtgtatcatggttcctaataaacatccaaaatatagtacttactattgtcattattattacttgtttgaagctaaagacctcacaatagaatcccatccagcccaccagacagagctctgagttttctagtttggaagagctattaaataacaacgtctagtgtcaattctatacttgttatggtcaagtactgggctcagcattttacattcattgtctctttaagttctagcaatgtgaagcaggaactatgattatattgactacataaatgaagaaattgaggctcagatacattaagtaattctcccagggtcacacagctaggaaaaactggcaaagcctgggattgatccatgatcttccagcattgaagaatcataaatgtaaataactgcaaggccttttcctcagaagagctcctggtgcttgcaccaacccactagcacttgttctctacaggggaacatctgtgggcctgggaatcactgcacgtcgcaagagatgttgcttctgatgaattattgttcctgtcagtggtgtgaaggcaaaaaaaaaaaaaatggttggaaattatggcttgctagcaaatgatgtcagacattctggttaatagagtaggaagggtcttacagatggagaaatgaagacccacggacatctcctgatgcacaaacttctcacaagtgacctggaggggcttggttctaatcttgtccctggactgcaccaactggggcactgacattctatgtggtcctctattaccattgggctggtcctgtcttccaggaaccagggcctctcccactgcaaccagaatggcctcagattctagggttagcattgacccagtaactacataaaaaagtggaatagattaaatagaacctcagacaaatcacagaaatggggctaaacctagccagcctgagcttcagatttaaaagttctctttctttataccagggaaatcaaaacctggatgttgtcttctctttttcttctggctttgacatagttaacaagccctaggatgtctgcactggaaaaatgggagatctcatttagtccaaactcctcctctgttaagagacctggaataaagccactattaatcaactattagtttggtgactattagtcaaagccaggaccagagccagaagctggactttcctttcccctggccaaaccttgtgtgcacactgtttcttcccctccccaccctgtcaggccattgatgtgatggctccccattcacaccttcatttctcctctttaacgtgaccagggctgttctgaacctccttactttggcctcctctgcccagaacaggtcaggcccctctgcatccatcaaccaggtgtgctctcctgaccattctttgtcagatgggcaccttcactaactcagctctttggattgctttgcagattatgtttgagactttcaatgtcccagccatgtatgtggctatccaggcggtgctgtctctctatgcctctggacgcacaactggtaggtggctgggcgggacagcaagctggttggagcgcactgccagagatgggattgaatggtcgttaacacgtgggggtgacggactggagttgagttagaatggacacggctgaacccagccctaaaagatcttcttctagtgttcaaaataagcccttgatctcatatttctagcagaacttttttctactgttttcctcttcctgttctttactttttttcatcttccccgagccctgtcccacctcacctctcctatcacatgccctgttttctctttttaaataagaggctcggaaattccctctcccccaaggcttccctctacttgtccagcaagtaaccacatgccagctgccatggtgacttatcacgcccaattgtctcccaggcatcgtgctggactctggagatggtgtcacccacaatgtccccatctatgagggctatgccttgccccatgccatcatgcgtctggatctggctggccgagatctcactgactacctcatgaagatcctgactgagcgtggctattccttcgttactactggtgaggcctgtgggagataagggggagaggggagcagtgtgttgctcagtaacttccaggaccatcctcactatccaggagatgatgggatgaagttttgcaatggcaggcctggctctaatgcacagagcaagcacatctttctttgctgtgtgaagttgcaaaatgattacactatttccttgaggagaacagttatagacacccagtgttatgcattagtcagtgttgtataattgatctttttttaatcccttccattgtccaccgcaaatgcttctaaaacactttcctgctcctctctgtctctagcacacaactgtgaatgtcctgtggaattatgccttcagttcttttccaaatcattcctagccaaagctctgactcgttacctatgtgttttttaataaatctgaaataggctactggtaaaaaaa

SEQ ID NO: 413 - DNA, 350 bp, Homo sapien
cgtttccactgactactattcattctcactgatgccagcgcttttcttcacttggaaaaaaaatccaatgagaaggaaaaaaaatgcatataatatatcttgtatctttccgcagtttcttaaagcctcagcttattaggatttcctcattgccagttgaagccagatacacaattgaagccatgtgatcctataataatttcagttttacagacatgctggcttgaaaagcatgctgttgaagaagtcattttcaaactaaaatcactcagttacagaaaacattatctcattttttttagttgggggaaagatataacatgtcatataacatgctatagaaccaaaca

SEQ ID NO: 414 - DNA, 2263 bp, Homo sapien
ctgagctctcagaagccaatgtgccgagcttgaagagaattgaaaactgtgacgaacaactgaaggtcactggaggctcaggctgagaagtactcgcagaaggaagacagatatgaggaagagatcaaggtcctttccgacaagctgaaggaggctgagactcgggctgagtttgcggagaggtcagtaactaaattggagaaaagcattgatgacttagaagacgagctgtacgctcagaaactgaagtacaaagccatcagcgaggagctggaccacgctctcaacgatatgacttccatgtaaacgttcatccactctgcctgcttacaccctgccctcatgctaatgtaataaactcaccaccatgccttccttgctccctaatctccatctttgcactcttgtgttcaccctttttgtcataacctagaatagtcattgttttttcactttctgctaatataaaggccaattagattaagtctgtctatacaaaccattttcttttcagaatccgtttattttgtaaacgctgaactagagcagtgaactagaatgagtgaccttgagcactgtccttttgggaaattaagctaaactcaagtaaaactagaaggccatgccgtttgttgtacaggaacttctcaaaaaatatcaaaatttgtttcctgaaattcaactaagtacaacataatcattttcgttaaatataatttgaaggaacccttaaagtgtcaggttattgagaatctgaggataaggaaattggcatgatccaatacagctttaacagtggtactacaaaagatcatctcttttacttttaagaattctagagtaggccgggcacagtggctcacgcctgtaatcccagcactttgggaggccgaggcgggcggatcacgaggtcaggagattgagaccatcctggctaacacggtgaaaccctgtctctactaaaaatacaaaaaaaattagccgggcgtggtggtggatgcctgtagtcccagctactcaggaggctgaggcaggagaatggcatgaacccgggaggtggagcttgcagtcagccgagatcgcaccaccgcactccagcctggacgacagagcgagactctgtctcaagaaaaaaaagaatggtagagtaaaaagaaccctctgctgagtaaccaagcctttaattttgtgtttttatgaaaggaattaaaatacccacgataaatatttaccacaacctgtgtcaaagaaatgggaaattaaacacagattgtacaatgtgagcttgggagttaatggcccagattttactgttaggcagtaagagttggagtaggtagtcttgttatcatgagaagaaccttgaacagatacaactaatttacatattactaaccaaacttaaacattaaactttttctactactttaaattctaacctggaatgtttcagagttcttcattctaatatcaccctgaattccattgaagctggaaatgtcattttccaagcccacctgtcattcatttacccatgcagaaaaaatggtaacttgaagagagtggcatgtgcctgctgccttagaggttatagaatccccacagtcaacaaaaaagcctctagagacatgactgttgccatggaaaccagagaaaatgtgtcttctcatccctcatttgtaaatgagggggtggagcagatcatctgtctctaaggtctttttcagtgctaaaatgtggtgattctttgggaaaaactttttgcatcaagtatgattaaatattctgaaagacgagtgtagcttaaaatttgttttgtttttaaattctgttcatgggtcttcttaaaatggacccttgccgaaaggcggcctgtgacggcctcaggtgggaagatggatgtccttccaagggtgtggctggcagtggggtttgcatgactgcttcttgtctgtgtttcaagtgctctcatctattggtttggtttcctttcttttttttttttttctcattgtgccacttttttttttcctcccacctttttatcttcacgcagataagtttctttgcttcacttctcccaagactccctcgtcgagctggatgtcccacctctctgagctctgcatttgtctattctccagctgaccctggttctctctcttagcatcctgccttagagccaggcacacactgtgctttctattgtacagaagctcttcgtttcagtgtcaaataaacactgtgtaagctaaaaaaaaaa

SEQ ID NO: 415 - DNA, 649 bp, Homo sapien
  misc_feature (100)..(100): n=a,c,g or t
  misc_feature (107)..(107): n=a,c,g or t
  misc_feature (120)..(224): n=a,c,g or t
cattttataatagcttttattcatcatgtttttattctgaatttaaaacctgctgtgttactgatcaaaaatgctttcagaaggctcgggtgcagtggcntcacacnctgtaatcccagnnnnnnnnnnnnnnnnnnnnnnnnnnnnnnnnnnnnnnnnnnnnnnnnnnnnnnnnnnnnnnnnnnnnnnnnnnnnnnnnnnnnnnnnnnnnnnnnnnnnnnnnntagaaaccttttattgtaaatattctccctggttgctatagtctttcatatctattatttcagttgcctcataaaattacacctgtcagtagattacattttatttgactattcccctattattgaatatttagatatatttcaatttttctgtgctttgaacatcttaatgtgtatggctttttttcttctttgtaattctgtctctaggacaaattcccaggagtgggattaccagaccaaagagcatgaatgtttttatggattgtgactgccaaaaggactgcaaaaattttcaacaccacaatgacgtatgagttgttccagttcccttgcagcgctagcattggactttagaagaaatctctttagatgattaaacattattttgatatttttcatttctttgattactcatgtgattg

SEQ ID NO: 416 - DNA, 226 bp, Homo sapien
agataacagaggaggaggagtggaggggagtgcgtgtgtgagagcgcgcgagggagtgtgagtgtgtgtgagcgcgggtgtgaggcggtgcgcaggggcgggcggaggcgctgtccggccccggccaggcgccgggcggggagcatgggaaggggctagaactgctcgagccccccagccccctccccgggatccgcgccccccctcccgggagagggctggaaag

SEQ ID NO: 417 - DNA, 511 bp, Homo sapien
  misc_feature (181)..(203): n=a,c,g or t
aagggatgtatgttttgtgatggagaaaatttattatgcttggcaggttttttttcttgagcaacagctaccatccatgatggataattttcagtattttttgatatgaaatcttacttgaaagaagatacattgtccttggaaattgtttggagctattattcatcaataaattttggannnnnnnnnnnnnnnnnnnnnnncaaccaaaatatgttgaccactcactgtgtacctggtgctgtgtgttgggataaaagagaaactgtacattgtctctgttttcaaggtacttatggtttagtggggaaataaaaatgtcaacaaatccttacgtcacagcagatactgaagcagcagatactgaagttaagggatgtgccaggtgctggggtatagggaaaaactactgacttgaaagatacaggcaaagtttgagtgaggaggtgatgtggaagatgagtctggaagaatgaataataataataagcaatgttgagtgacttactgt

SEQ ID NO: 418 - DNA, 1335 bp, Homo sapien
  misc_feature (166)..(189): n=a,c,g or t
aatccacctctccgcctgtgcaacacacactttacacacgcacggggactgcaagcgggcagcatcgatcgtggctcctttaagacaaactcagacagacattttttttaaccctccttctctaatctccttccagtgcagcacttgcaaagagggagagagaggnnnnnnnnnnnnnnnnnnnnnnnnagagagaaactgattaggaattaggactgattcaagggaagcgagcgctagggctttgtgcatttgaatattaacatttgaggtgttctgaccagaagaagacagagcggatgatcattcattcaccacgttgacaacctcgcctgtgattgacagctggagtggcagaaagccatgagatttggtagttgggtctgaggggcgctcttttttttccttttcttgctgtctttctttggttttttttaaactgatttttgggggagagaagatctgcttttttttgcccccgctgctgtcttggaaacggagcgcttttatgctcagtgactcgggcgctttgcttcaggtcccgtagaccgaaggatctgggaccagtagcatcacgttgctggagacgtcaagggattttcgtcgtgctttttgtttttttttcccggggaattggaatatggggtttcttttggcacagggtgggcctaaaaagagaggcatatcctggcacagagtctcgcaaagttaggaagaggggagccccagaagaaaggcctgatgtggggccaagggttccgaaggattatacccacatatagcgggggcctcttggatgtgggagtagggattccgcttccaagagatgttttgtggggagaccccgaatgtgcaaggcacagggctccatgtgaaaggccggggatccacaccaacttgtgaaccccacgggggcctctcctatgcgtgacaccctcgaatataagagagaacccgggaaacagcagagttacattaccacaaggggcatatgtggccccacagaagaatggggggctcctcccccattcggtggggtccaaaagtgggagcgctttttttatacagaggcacgcactatttcttcgggtgtctgccctatttatagttgggacagacccccccgctgtatttgtgccgcgatccttctatatacgacgacacgttggaaatttagtggggacgaacaacgtgggtggaatattgacggctctactttgtggtataccccccccgcgggtggaaaaaccgtgtggattttgtggggtactgagggcaacaccatattagtggcctcgtctcaagagaggtcatttactagtgggcacagaactt

SEQ ID NO: 419 - DNA, 750 bp, Homo sapien
  misc_feature (366)..(423): n=a,c,g or t
tataggcgaatgggcctctaatcatctcgagcggcgcagtgtgctgaatggtctatgcgtgtttacacttcctgtgcatggaatcacctggggacctgtggcgctacagatcctggctcagtagatctagggtagggtaaggcctgagattccacatcctgaacaagctcccgagtggcattgccaatgctaactcaccaccaaactttgagaagcaagcctctaaggcagaggttctccaagtgtgctccctggaccacctacagtatcagcctcaactgggagcttgctagaaatgcacactatcaggccacacctagatatagccctcctgactctgaaactctggaggtgggtcccagccannnnnnnnnnnnnnnnnnnnnnnnnnnnnnnnnnnnnnnnnnnnnnnnnnnnnnnnnnttctggagcactatttggccatttcctgagacgtaaaacacaagaagaaatgtaggtttgggaggtcccaggaacgatgttggcatagccagagagtatctctttctggccaaacaggggctcccctgatgatctgaggccttttcctcagcacgtgtggccgcaggagcatgaggggacataaaggggcagcctgactcaggctgaaccttgtgcccttggattcaccttcccactccctgctcagcctgggtcctctggtggccaaagtgaaggagtaccaggtggagaccattgtggacaccctgtgcaccaacatgcggtcag

SEQ ID NO: 420 - protein, 60 aa, Homo sapien
MANKIGNCIYMHGSNYLFKTRMNVKKNTYSELYNEVFTSARNYFPGLKFCMLLSLNTSNI

SEQ ID NO: 421 - protein, 70 aa, Homo sapien [sequence omitted]

SEQ ID NO: 422 - protein, 79 aa, Homo sapien
MHKAQVLRDFLPTKITLWTNASLLDTFSKNIWHAKQGKVLCGGSKFFRNKEMAVRALVACHVAWHCRLIGCGRVNTAAM

SEQ ID NO: 423 - protein, 73 aa, Homo sapien [sequence omitted]

SEQ ID NO: 424 - protein, 45 aa, Homo sapien
MRREKREDGEEKGALLGAKLAHRGCACLAWLTPSFLLPWGSSAAG

SEQ ID NO: 425 - protein, 112 aa, Homo sapien
PPDPYPAADDPQGSKKDGVSQARQAQPLWASFALSKAPFSSPSSLFSLLILKGQSRVGEFSHLLSLSLATGKPPRKYSKSFQARLEISRRNQDRKITKICRDLNFNCLAVKT

SEQ ID NO: 426 - protein, 218 aa, Homo sapien
MTRLSLGEHVRIPGATVSGTVLLEDTCSDHKAELSVLAALSLLVVFVLVQRGCSPVSKAALALGLLGVYCYRAAIGSVRFPWRPDSKDISKQGNSNNIATVDISAGFVGLDTYVEIPAVLLTAFGTYAGPVLWASHLVHFLSSETRSGSALSHACFCYALICSIPVFTYIVLVTSLRYHLFIWSVFSPKLLYEGMHLLITAAVCVFFTAMDQTRLTQS

SEQ ID NO: 427 - protein, 166 aa, Homo sapien
MHPSSRWSELDLLILLGTAGHVLSLGASSFVEEEHQTWYFLVNTLCLALSQETYRNYFLGDDGEPPCGLCVEQGHDGATAAWQDGPGCDVLERDKGHGSPSTSEVLRGREKWMVLASPWLILACCRLLRSLNQTGVQWAHRPDLGHWLTSHSENALITAKMAPSHS

SEQ ID NO: 428 - protein, 139 aa, Homo sapien
MHYCIGQALLYLQVNCSIIDTEDIIVGLVGYRPYRETLNELHEARGTYSGAVLCAQSLTHYLSSETLWVSAMLHDSFWYPLHMTITDYACIEPVTAGVKPTIYTADFSPKLLYEGMHLLITAAVCVFFTAMDQTRLTQS

SEQ ID NO: 429 - protein, 37 aa, Homo sapien
  MISC_FEATURE (3)..(3): x=any amino acid
IPXLQDSARAGHCRQGEGVPPRQGQLGSLKERLGSHL

SEQ ID NO: 430 - protein, 139 aa, Homo sapien
MSTSRGSHAASDAAGGGGWHRRCELPGKLGALLGLEGSGLLTPIPALPTRNVSSVCQLFCSTSSAASCTQAQGCWRVYGEECGSGSASASASASSMVLSPGGSQVPIPPLTFHSSWLSKGTSSYGIATPTLILPPNILI

SEQ ID NO: 431 - protein, 139 aa, Homo sapien; identical to SEQ ID NO: 430

SEQ ID NO: 432 - protein, 80 aa, Homo sapien [sequence omitted]

SEQ ID NO: 433 - protein, 63 aa, Homo sapien [sequence omitted]

SEQ ID NO: 434 - protein, 125 aa, Homo sapien
MVFMTSDGPSYCNSGLRFPESEQGLLPLKSCLPLHCLSSCPVQENRSRRVAWKLKLFRRSSGYRSETDPERLRSPSAVSRRHRKTRGCISTPGAHILQPSFRAFSCCLGVLWGRALVTKQGCAPH

SEQ ID NO: 435 - protein, 138 aa, Homo sapien
LIYISSESLYLNSRKWSVSGPGPTAGFSVLKETLEVWRQHCLDVGYLWESGSVERRRGASFYTQCILNKGKRKVSSPPLTWSPLLCLNGEQDLLLAAAYVLDAQYNRNVPFETHLRPSDVTIFITTRQRRLPHTSLFV

SEQ ID NO: 436 - protein, 158 aa, Homo sapien
MEKLTEDSRKKKKGAGIFGKETRIQNTTKLLIFGFLVWTMVAATHIVYPLLQGWVMYVSLTSFLISLMFLLSYLFGFYKRFESWRVLDSLYHGTTGILYMSAAVLQVHATIVSEKLLDPRIYYINSAASFFAFIATLLYILLPQPHWKKRLPQHLSEE

SEQ ID NO: 437 - protein, 143 aa, Homo sapien [sequence omitted]

SEQ ID NO: 438 - protein, 149 aa, Homo sapien
MEKLTEDSRKKKKGAGIFGKETRIQNTTKLLIFGFLVWTMVAATHIVYPLLQGWVMYVSLTSFLISLMFLLSYLFGFYKRFESWRVLDSLYHGTTGILYMSAAVLQVHATIVSEKLLDPRIYYINSAASFFAFIATLLYILHAFSIYYH

SEQ ID NO: 439 - protein, 126 aa, Homo sapien [sequence omitted]

SEQ ID NO: 440 - protein, 506 aa, Homo sapien
MGLLSDPVRRRALARLVLRLNAPLCVLSYVAGIAWFLALVFPPLTQRTYMSENAMGSTMVEEQFAGGDRARAFARDFAAHRKKSGALPVAWLERTMRSVGLEVYTQSFSRKLPFPDETHERYMVSGTNVYGILRAPRAASTESLVLTVPCGSDSTNSQAVGLLLALAAHFRGQIYWAKDIVFLVTEHDLLGTEAWLEAYHDVNVTGMQSSPLQGRAGAIQAAVALELSSDVVTSLDVAVEGLNGQLPNLDLLNLFQTFCQKGGLLCTLQGQGGAACLPEGCRAQGLWEGLSHPVLHLKLQPEDWTSLDELLQGLQTLLLMILWQASRGLFLHYHVEALTLRRISSFRQYKYDLVAAGKALEGMFCKLNHLLEHPHQLFFLYLLPTLSRFVSIGLYMPATSFLLLVLGFKALQLWMQLHEAGVGLEELRGVPDPSVPPPPAQDGKHTGPRQGLDGSEAGSPDLPSTAAGLHRPHQLLTGLPAGRHYGAAAVLAEPLGPGPSVLPCWC

SEQ ID NO: 441 - protein, 149 aa, Homo sapien [sequence omitted]

SEQ ID NO: 442 - protein, 156 aa, Homo sapien [sequence omitted]

SEQ ID NO: 443 - protein, 187 aa, Homo sapien
MILWQASRGLFLHYHVEALTLRRISSFRQYKYDLVAAGKALEGMFCKLNHLLEHPHQLFFLYLLPTLSRFVSIGLYMPATSFLLLVLGFKALQLWMQLHEAGVGLEELRGVPDPSVPPPPAQDGKHTGPRQGLDGSEAGSPDLPSTAAGLHRPHQLLTGLPAGRHYGAAAVLAEPLGPGPSVLPCWC

SEQ ID NO: 444 - protein, 34 aa, Homo sapien
SELVPILKSVDRYDIITVLGFKVNVFLKKAVFFC

SEQ ID NO: 445 - protein, 390 aa, Homo sapien
MAQRYDDLPHYGGMDGVGIPSTMYGDPHAARSMQPVHHLNHGPPLHSHQYPHTAHTNAMAPSMGSSVNDALKRDKDAIYGHPLFPLLALIFEKCELATCTPREPGVAGGDVCSSESFNEDIAVFAKQIRAEKPLFSSNPELDNLMIQAIQVLRFHLLELEKVHELCDNFCHRYISCLKGKMPIDLVIDDREGGSKSDSEDITRSANLTDQPSWNRDHDDTASTRSGGTPGPSSGGHTSHSGDNSSEQGDGLDNSVASPSTGDDDDPDKDKKRHKKRGIFPKVATNIMRAWLFQHLTHPYPSEEQKKQLAQDTGLTILQVNNWFINARRRIVQPMIDQSNRAVSQGTPYNPDGQPMGGFVMDGQQHMGIRAPGPMSGMGMNMGMEGQWHYM

SEQ ID NO: 446 - protein, 400 aa, Homo sapien
MAQGLRLQGSRRKGRHPLFPLLALIFEKCELATCTPREPGVAGGDVCSSESFNEDIAVFAKQIRAEKPLFSSNPELDNLMIQAIQVLRFHLLELEKVHELCDNFCHRYISCLKGKMPIDLVIDDREGGSKSDSEDITRSANLTDQPSWNRDHDDTASTRSGGTPGPSSGGHTSHSGDNSSEQGDGLDNSVASPSTGDDDDPDKDKKRHKKRGIFPKVATNIMRAWLFQHLTHPYPSEEQKKQLAQDTGLTILQVNNWFINARRRIVQPMIDQSNRAVSQGTPYNPDGQPMGGFVMDGQQHMGIRAPGLQSMPGEYVARGGPMGVSMGQPSYTQPQMPPHPAQLRHGPPMHTYIPGHPHHPTVMMHGGPPHPGMPMSASSPTVLNTGDPTMSGQVMDIHAQ

SEQ ID NO: 447 - protein, 388 aa, Homo sapien
MQYDDLPHYGGMDGVGIPSTMYGDPHAARSMQPVHHLNHGPPLHSHQYPHTAHTNAMAPSMGSSVNDALKRDKDAIYGHPLFPLLALIFEKCELATCTPREPGVAGGDVCSSESFNEDIAVFAKQIRAEKPLFSSNPELDNLMIQAIQVLRFHLLELEKVHELCDNFCHRYISCLKGKMPIDLVIDDREGGSKSDSEDITRSANLTDQPSWNRDHDDTASTRSGGTPGPSSGGHTSHSGDNSSEQGDGLDNSVASPSTGDDDDPDKDKKRHKKRGIFPKVATNIMRAWLFQHLTHPYPSEEQKKQLAQDTGLTILQVNNWFINARRRIVQPMIDQSNRAVSQGTPYNPDGQPMGGFVMDGQQHMGIRAPGPMSGMGMNMGMEGQWHYM

SEQ ID NO: 448 - protein, 406 aa, Homo sapien
MAQRRKMESCAFAFEFALNLYDDLPHYGGMDGVGIPSTMYGDPHAARSMQPVHHLNHGPPLHSHQYPHTAHTNAMAPSMGSSVNDALKRDKDAIYGHPLFPLLALIFEKCELATCTPREPGVAGGDVCSSESFNEDIAVFAKQIRAEKPLFSSNPELDNLMIQAIQVLRFHLLELEKVHELCDNFCHRYISCLKGKMPIDLVIDDREGGSKSDSEDITRSANLTDQPSWNRDHDDTASTRSGGTPGPSSGGHTSHSGDNSSEQGDGLDNSVASPSTGDDDDPDKDKKRHKKRGIFPKVATNIMRAWLFQHLTHPYPSEEQKKQLAQDTGLTILQVNNWFINARRRIVQPMIDQSNRAVSQGTPYNPDGQPMGGFVMDGQQHMGIRAPGPMSGMGMNMGMEGQWHYM

SEQ ID NO: 449 - protein, 246 aa, Homo sapien
MIQAIQVLRFHLLELEKVHELCDNFCHRYISCLKGKMPIDLVIDDREGGSKSDSEDITRSANLTDQPSWNRDHDDTASTRSGGTPGPSSGGHTSHSGDNSSEQGDGLDNSVASPSTGDDDDPDKDKKRHKKRGIFPKVATNIMRAWLFQHLTHPYPSEEQKKQLAQDTGLTILQVNNWFINARRRIVQPMIDQSNRAVSQGTPYNPDGQPMGGFVMDGQQHMGIRAPGPMSGMGMNMGMEGQWHYM

SEQ ID NO: 450 - protein, 104 aa, Homo sapien
MRAWLFQHLTHPYPSEEQKKQLAQDTGLTILQVNNWFINARRRIVQPMIDQSNRAVSQGTPYNPDGQPMGGFVMDGQQHMGIRAPGPMSGMGMNMGMEGQWHYM

SEQ ID NO: 451 - protein, 325 aa, Homo sapien
MAQGLRLQGSRRKGRHPLFPLLALIFEKCELATCTPREPGVAGGDVCSSESFNEDIAVFAKQIRAEKPLFSSNPELDNLMIQAIQVLRFHLLELEKVHELCDNFCHRYISCLKGKMPIDLVIDDREGGSKSDSEDITRSANLTDQPSWNRDHDDTASTRSGGTPGPSSGGHTSHSGDNSSEQGDGLDNSVASPSTGDDDDPDKDKKRHKKRGIFPKVATNIMRAWLFQHLTHPYPSEEQKKQLAQDTGLTILQVNNWFINARRRIVQPMIDQSNRAVSQGTPYNPDGQPMGGFVMDGQQHMGIRAPGPMSGMGMNMGMEGQWHYM

SEQ ID NO: 452 - protein, 390 aa, Homo sapien
  MISC_FEATURE (326)..(326): x=any amino acid
  MISC_FEATURE (333)..(333): x=any amino acid
  MISC_FEATURE (336)..(336): x=any amino acid
  MISC_FEATURE (356)..(356): x=any amino acid
  MISC_FEATURE (358)..(358): x=any amino acid
  MISC_FEATURE (375)..(375): x=any amino acid
  MISC_FEATURE (378)..(378): x=any amino acid
MAQGLRLQGSRRKGRHPLFPLLALIFEKCELATCTPREPGVAGGDVCSSESFNEDIAVFAKQIRAEKPLFSSNPELDNLMIQAIQVLRFHLLELEKVHELCDNFCHRYISCLKGKMPIDLVIDDREGGSKSDSEDITRSANLTDQPSWNRDHDDTASTRSGGTPGPSSGGHTSHSGDNSSEQGDGLDNSVASPSTGDDDDPDKDKKRHKKRGIFPKVATNIMRAWLFQHLTHPYPSEEQKKQLAQDTGLTILQVNNWFINARRRIVQPMIDQSNRAVSQGTPYNPDGQPMGGFVMDGQQHMGIRAPGPMSGMGMNMGMEGQWHYQXWVFKTLXNPXFNPIPPKARGEGCKVIARGXMXPGVGPIGVLKLLGNSPXFIXPNPPKLPPPSWL

SEQ ID NO: 453 - protein, 80 aa, Homo sapien
MAQRYDDLPHYGGMDGVGIPSTMYGDPHAARSMQPVHHLNHGPPLHSHQYPHTAHTNAMAPSMGSSVNDALKRDKDAIYG

SEQ ID NO: 454 - protein, 313 aa, Homo sapien
MAQGLRLQGSRRKGRHPLFPLLALIFEKCELATCTPREPGVAGGDVCSSESFNEDIAVFAKQIRAEKPLFSSNPELDNLMIQAIQVLRFHLLELEKVHELCDNFCHRYISCLKGKMPIDLVIDDREGGSKSDSEDITRSANLTDQPSWNRDHDDTASTRSGGTPGPSSGGHTSHSGDNSSEQGDGLDNSVASPSTGDDDDPDKDKKRHKKRGIFPKVATNIMRAWLFQHLTHPYPSEEQKKQLAQDTGLTILQVNNWFINARRRIVQPMIDQSNRAVSQGTPYNPDGQPMGGFVMDGQQHMGIRAPGKTLFLW

SEQ ID NO: 455 - protein, 146 aa, Homo sapien
  MISC_FEATURE (140)..(141): x=any amino acid
  MISC_FEATURE (160)..(160): x=any amino acid
MFAGDGLDNSVASPSTGDDDDPDKDKKRHKKRGIFPKVATNIMRAWLFQHLTHPYPSEEQKKQLAQDTGLTILQVNNWFINARRRIVQPMIDQSNRAVSQGTPYNPDGQPMGGFVMDGQQHMGIRAPGPMSGMGMNMGMEGQWHYM

SEQ ID NO: 456 - protein, 257 aa, Homo sapien
MAQGLRLQGSRRKGRHPLFPLLALIFEKCELATCTPREPGVAGGDVCSSESFNEDIAVFAKQIRAEKPLFSSNPELDNLMIQAIQVLRFHLLELEKVHELCDNFCHRYISCLKGKMPIDLVIDDREGGSKSDSEDITRSANLTDQPSWNRDHDDTASTRSGGTPGPSSGGHTSHSGDNSSEQGDGLDNSVASPSTGDDDDPDKDKKRHKKRGIFPKVATNIMRAWLFQHLTHPYPSEEQKKQLAQDTGLTILQVNNW

SEQ ID NO: 457 - protein, 45 aa, Homo sapien
MGQRTGKGRLGPSLQVTFHPSEKDSTQQLLTVPAPGVQTRSSCKF

SEQ ID NO: 458 - protein, 104 aa, Homo sapien
MLKMIVGLYFFLELERWYLIDSWLLTVEESTLIITMSALCMQSLFLNPFKSSSLSLVWCHLTVIHPGTGLCFTFSCFGFIVPPEYEDLRILSTLENPQPLALKS

SEQ ID NO: 459 - protein, 69 aa, Homo sapien
MDISKYQSWGRRHSVCLIKFLRSQPDKFCTNNFVSGFFSPLLIWKHRPRNIYSRFPCLMEELMEVLQPP

SEQ ID NO: 460 - protein, 15 aa, Homo sapien
MAESLNGIILVYNLK

SEQ ID NO: 461 - protein, 48 aa, Homo sapien [sequence omitted]

SEQ ID NO: 462 - protein, 54 aa, Homo sapien [sequence omitted]

SEQ ID NO: 463 - protein, 41 aa, Homo sapien
MKIRSILLLLIHKPHLNQNTFNYLYIKNVPKHHKTSTELLP

SEQ ID NO: 464 - protein, 109 aa, Homo sapien
MAPAPSSLCGRGSGTQRAPGARAAPEHPAGAANPAPIRAGRPALASCELRRFGQGVPSLRSSSARGTPSAATDTGRGQCCRCAWKTGVQPRSPSSVPAGIFLWARSAKP

SEQ ID NO: 465 - protein, 1093 aa, Homo sapien [sequence omitted]

SEQ ID NO: 466 - protein, 68 aa, Homo sapien
MAMVGKDIRFTCSAASSSSSPKNHLVEIPTKLPSSLVELRIHGDRDPRGSRCPSDMVQGDSKYCRASR

SEQ ID NO: 467 - protein, 1070 aa, Homo sapien
MARPVRGGLGAPRRSPCLLLLWLLLLRLEPVTAAAGPRAPCAAACTCAGDSLDCGGRGLAALPGDLPSWTRSLNLSYNKLSEIDPAGFEDLPNLQEVYLNNNELTAVPSLGAASSHVVSLFLQHNKIRSVEGSQLKAYLSLEVLDLSLNNITEVRNTCFPHGPPIKELNLAGNRIGTLELGAFDGLSRSLLTLRLSKNRIRLIEGLTFQGLNSLEVLKLQRNNISKLTDGAFWGLSKMHVLHLEYNSLVEVNSGSLYGLTALHQLHLSNNSIARIHRKGWSFCQKLHELVLSFNNLTRLDEESLAELSSLSVLRLSHNSISHIAEGAFKGLRSLRVLDLDHNEISGTIEDTSGAFSGLDSLSKLTLFGNKIKSVAKRAFSGLEGLEHLNLGGNAIRSVQFDAFVKMKNLKELHISSDSFLCDCQLKWLPPWLIGRMLQAFVTATCAHPESLKGQSIFSVPPESFVCDDFLKPQIITQPETTMAMVGKDIRFTCSAASSSSSPMTFAWKKDNEVLTNADMENFVHVHAQDGEVMEYTTILHLRQVTFGHEGRYQCVITNHFGSTYSHKARLTVNVLPSFTKTPHDITIRTTTVARLECAATGHPNPQIAWQKDGGTDFPAARERRMHVMPDDDVFFITDVKIDDAGVYSCTAQNSAGSISANATLTVLETPSLVVPLEDRVVSVGETVALQCKATGNPPPRITWFKGDRPLSLTERHHLTPDNQLLVVQNVVAEDAGRYTCEMSNTLGTERAHSQLSVLPAAGCRKDGTTVGIFTIAVVSSIVLTSLVWVCIIYQTRKKSEEYSVTNTDETVVPPDVPSYLSSQGTLSDRQETVVRTEGGPQANGHIESNGVCPRDASHFPEPDTHSVACRQPKLCAGSAYHKEPWKAMEKAEGTPGPHKMEHGGRVVCSDCNTEVDCYSRGQAFHPQPVSRDSAQPSAPNGPEPGGSDQEHSPHHQCSRTAAGSCPECQGSLYPSNHDRMLTAVKKKPMASLDGKGDSSWTLARLYHPDSTELQPASSLTSGSPERAEAQYLLVSNGHLPKACDASPESTPLTGQLPGKQRVPLLLAPKS

SEQ ID NO: 468 - protein, 694 aa, Homo sapien
MARPVRGGLGAPRRSPCLLLLWLLLLRLEPVTAAAGPRAPCAAACTCAGDSLDCGGRGLAALPGDLPSWTRSLNLSYNKLSEIDPAGFEDLPNLQEVYLNNNELTAVPSLGAASSHVVSLFLQHNKIRSVEGSQLKAYLSLEVLDLSLNNITEVRNTCFPHGPPIKELNLAGNRIGTLELGAFDGLSRSLLTLRLSKNRITQLPVRAFKLPRLTQLDLNRNRIRLIEGLTFQGLNSLEVLKLQRNNISKLTDGAFWGLSKMHVLHLEYNSLVEVNSGSLYGLTALHQLHLSNNSIARIHRKGWSFCQKLHELVLSFNNLTRLDEESLAELSSLSVLRLSHNSISHIAEGAFKGLRSLRVLDLDHNEISGTIEDTSGAFSGLDSLSKLTLFGNKIKSVAKRAFSGLEGLEHLNLGGNAIRSVQFDAFVKMKNLKELHISSDSFLCDCQLKWLPPWLIGRMLQAFVTATCAHPESLKGQSIFSVPPESFVCDDFLKPQIITQPETTMAMVGKDIRFTCSAASSSSSPMTFAWKKDNEVLTNADMENFVHVHAQDGEVMEYTTILHLRQVTFGHEGRYQCVITNHFGSTYSHKARLTVNVLPSFTKTPHDITIRTTTVARLECAATGHPNPQIAWQKDGGTDFPAAQTPSLVVPLEDRVVSVGVTKSILHITSAAGLPLGPAPSAKGRSTPVTTIEC

SEQ ID NO: 469 - protein, 921 aa, Homo sapien
MARPVRGGLGAPRRSPCLLLLWLLLLRLEPVTAAAGPRAPCAAACTCAGDSLDCGGRGLAALPGDLPSWTRSLNLSYNKLSEIDPAGFEDLPNLQEVYLNNNELTAVPSLGAASSHVVSLFLQHNKIRSVEGSQLKAYLSLEVLDLSLNNITEVRNTCFPHGPPIKELNLAGNRIGTLELGAFDGLSRSLLTLRLSKNRITQLPVRAFKLPRLTQLDLNRNRIRLIEGLTFQGLNSLEVLKLQRNNISKLTDGAFWGLSKMHVLHLEYNSLVEVNSGSLYGLTALHQLHLSNNSIARIHRKGWSFCQKLHELVLSFNNLTRLDEESLAELSSLSVLRLSHNSISHIAEGAFKGLRSLRVLDLDHNEISGTIEDTSGAFSGLDSLSKLTLFGNKIKSVAKRAFSGLEGLEHLNLGGNAIRSVQFDAFVKMKNLKELHISSDSFLCDCQLKWLPPWLIGRMLQAFVTATCAHPESLKGQSIFSVPPESFVCDDFLKPQIITQPETTMAMVGKDIRFTCSAASSSSSPMTFAWKKDNEVLTNADMENFVHVHAQDGEVMEYTTILHLRQVTFGHEGRYQCVITNHFGSTYSHKARLTVNVLPSFTKTPHDITIRTTTVARLECAATGHPNPQIAWQKDGGTDFPAARERRMHVMPDDDVFFITDVKIDDAGVYSCTAQNSAGSISANATLTVLETPSLVVPLEDRVVSVGETVALQCKATGNPPPRITWFKGDRPLSLTERHHLTPDNQLLVVQNVVAEDAGRYTCEMSNTLGTERAHSQLSVLPAAGCRKDGTTVGIFTIAVVSSIVLTSLVWVCIIYQTRKKSEEYSVTNTDETVVPPDVPSYLSSQGTLSDRQETVVRTEGGPQANGHIESNGKASVTVKQSSAVTVSLGAGGGLQVFTGQVPGIRWGLVKNKDTGLTQDS

SEQ ID NO: 470 - protein, 678 aa, Homo sapien
MARPVRGGLGAPRRSPCLLLLWLLLLRLEPVTAAAGPRAPCAAACTCAGDSLDCGGRGLAALPGDLPSWTRSLNLSYNKLSEIDPAGFEDLPNLQEVYLNNNELTAVPSLGAASSHVVSLFLQHNKIRSVEGSQLKAYLSLEVLDLSLNNITEVRNTCFPHGPPIKELNLAGNRIGTLELGAFDGLSRSLLTLRLSKNRITQLPVRAFKLPRLTQLDLNRNRIRLIEGLTFQGLNSLEVLKLQRNNISKLTDGAFWGLSKMHVLHLEYNSLVEVNSGSLYGLTALHQLHLSNNSIARIHRKGWSFCQKLHELVLSFNNLTRLDEESLAELSSLSVLRLSHNSISHIAEGAFKGLRSLRVLDLDHNEISGTIEDTSGAFSGLDSLSKLTLFGNKIKSVAKRAFSGLEGLEHLNLGGNAIRSVQFDAFVKMKNLKELHISSDSFLCDCQLKWLPPWLIGRMLQAFVTATCAHPESLKGQSIFSVPPESFVCDDFLKPQIITQPETTMAMVGKDIRFTCSAASSSSSPMTFAWKKDNEVLTNADMENFVHVHAQDGEVMEYTTILHLRQVTFGHEGRYQCVITNHFGSTYSHKARLTVNVLPSFTKTPHDITIRTTTVARLECAATGHPNPQIAWQKDGGTDFPAARERRMHVMPDDDVFFITDVKIDDAGGYYWVNCRWY

SEQ ID NO: 471 - protein, 411 aa, Homo sapien
MARPVRGGLGAPRRSPCLLLLWLLLLRLEPVTAAAGPRAPCAAACTCAGDSLDCGGRGLAALPGDLPSWTRSLNLSYNKLSEIDPAGFEDLPNLQEVYLNNNELTAVPSLGAASSHVVSLFLQHNKIRSVEGSQLKAYLSLEVLDLSLNNITEVRNTCFPHGPPIKELNLAGNRIGTLELGAFDGLSRSLLTLRLSKNRITQLPVRAFKLPRLTQLDLNRNRIRLIEGLTFQGLNSLEVLKLQRNNISKLTDGAFWGLSKMHVLHLEYNSLVEVNSGSLYGLTALHQLHLSNNSIARIHRKGWSFCQKLHELVLSFNNLTRLDEESLAELSSLSVLRLSHNSISHIAEGAFKGLRSLRVLDLDHNEISGTIEDTSGAFSGLDSLSKLTLFGNKIKSVAKRAFSGLEGLEHL

SEQ ID NO: 472 - protein, 459 aa, Homo sapien
RDSCCAEEPCGTRGCARARALWPRRGDSEAHWGLPARGRPRRPARGLRLCAPSPEEDACRHRARAAGLNACLPGAAAALPSAGVGSGTRRAPGGRRAQAGYTLPESAEFAASEGGPAGPDGRGVCGPRRVLRSGPGTGGTLSAGAAAAERTWGGGHAPVRSLEPSGAPRGPARVCGRSGPHSPRARSSQRAPDKMARPVRGGLGAPRRSPCLLLLWLLLLRLEPVTAAAGPRAPCAAACTCAGDSLDCGGRGLAALPGDLPSWTRSLNLSYNKLSEIDPAGFEDLPNLQEVYLNNNELTAVPSLGAASSHVVSLFLVRTTLQTTAQQKTTQEGKASEKEPTEDSKEVKKEQEEEKQADTGRERNTERRPHEDPPKKREAQAEAGKTGKAPKMKGSRREGYKTRDGSENDRRPRSKKTKKQPPANQEKKQKQEQPQSETQMKDPQRRNTKKRAKEKRATP

SEQ ID NO: 473 - protein, 1196 aa, Homo sapien
MARPVRGGLGAPRRSPCLLLLWLLLLRLEPVTAAAGPRAPCAAACTCAGDSLDCGGRGLAALPGDLPSWTRSLLSAALSALSAPRGSVTWGWSGGGSYSGRGCGLGCVCGVVRACACWKTVRLEWRKGDSAWRSGGVGVRESLEKKSVPRGVWRRASVGRRDLGVSQHASCVAIWGNLSYNKLSEIDPAGFEDLPNLQEVYLNNNELTAVPSLGAASSHVVSLFLQHNKIRSVEGSQLKAYLSLEVLDLSLNNITEVRNTCFPHGPPIKELNLAGNRIGTLELGAFDGLSRSLLTLRLSKNRITQLPVRAFKLPRLTQLDLNRNRIRLIEGLTFQGLNSLEVLKLQRNNISKLTDGAFWGLSKMHVLHLEYNSLVEVNSGSLYGLTALHQLHLSNNSIARIHRKGWSFCQKLHELVLSFNNLTRLDEESLAELSSLSVLRLSHNSISHIAEGAFKGLRSLRVLDLDHNEISGTIEDTSGAFSGLDSLSKLTLFGNKIKSVAKRAFSGLEGLEHLNLGGNAIRSVQFDAFVKMKNLKELHISSDSFLCDCQLKWLPPWLIGRMLQAFVTATCAHPESLKGQSIFSVPPESFVCDDFLKPQIITQPETTMAMVGKDIRFTCSAASSSSSPMTFAWKKDNEVLTNADMENFVHVHAQDGEVMEYTTILHLRQVTFGHEGRYQCVITNHFGSTYSHKARLTVNVLPSFTKTPHDITIRTTTVARLECAATGHPNPQIAWQKDGGTDFPAARERRMHVMPDDDVFFITDVKIDDAGVYSCTAQNSAGSISANATLTVLETPSLVVPLEDRVVSVGETVALQCKATGNPPPRITWFKGDRPLSLTERHHLTPDNQLLVVQNVVAEDAGRYTCEMSNTLGTERAHSQLSVLPAAGCRKDGTTVGIFTIAVVSSIVLTSLVWVCIIYQTRKKSEEYSVTNTDETVVPPDVPSYLSSQGTLSDRQETVVRTEGGPQANGHIESNGVCPRDASHFPEPDTHSVACRQPKLCAGSAYHKEPWKAMEKAEGTPGPHKMEHGGRVVCSDCNTEVDCYSRGQAFHPQPVSRDSAQPSAPNGPEPGGSDQEHSPHHQCSRTAAGSCPECQGSLYPSNHDRMLTAVKKKPMASLDGKGDSSWTLARLYHPDSTELQPASSLTSGSPERAEAQYLLVSNGHLPKACDASPESTPLTGQLPGKQRVPLLLAPKS

SEQ ID NO: 474 - protein, 1045 aa, Homo sapien
MARPVRGGLGAPRRSPCLLLLWLLLLRLEPVTAAAGPRAPCAAACTCAGDSLDCGGRGLAALPGDLPSWTRSLNLSYNKLSEIDPAGFEDLPNLQEVQHNKIRSVEGSQLKAYLSLEVLDLSLNNITEVRNTCFPHGPPIKELNLAGNRIGTLELGAFDGLSRSLLTLRLSKNRIRLIEGLTFQGLNSLEVLKLQRNNISKLTDGAFWGLSKMHVLHLEYNSLVEVNSGSLYGLTALHQLHLSNNSIARIHRKGWSFCQKLHELVLSFNNLTRLDEESLAELSSLSVLRLSHNSISHIAEGAFKGLRSLRVLDLDHNEISGTIEDTSGAFSGLDSLSKLTLFGNKIKSVAKRAFSGLEGLEHLNLGGNAIRSVQFDAFVKMKNLKELHISSDSFLCDCQLKWLPPWLIGRMLQAFVTATCAHPESLKGQSIFSVPPESFVCDDFLKPQIITQPETTMAMVGKDIRFTCSAASSSSSPMTFAWKKDNEVLTNADMENFVHVHAQDGEVMEYTTILHLRQVTFGHEGRYQCVITNHFGSTYSHKARLTVNVLPSFTKTPHDITIRTTTVARLECAATGHPNPQIAWQKDGGTDFPAARERRMHVMPDDDVFFITDVKIDDAGVYSCTAQNSAGSISANATLTVLETPSLVVPLEDRVVSVGETVALQCKATGNPPPRITWFKGDRPLSLTERHHLTPDNQLLVVQNVVAEDAGRYTCEMSNTLGTERAHSQLSVLPAAGCRKDGTTVGIFTIAVVSSIVLTSLVWVCIIYQTRKKSEEYSVTNTDETVVPPDVPSYLSSQGTLSDRQETVVRTEGGPQANGHIESNGVCPRDASHFPEPDTHSVACRQPKLCAGSAYHKEPWKAMEKAEGTPGPHKMEHGGRVVCSDCNTEVDCYSRGQAFHPQPVSRDSAQPSAPNGPEPGGSDQEHSPHHQCSRTAAGSCPECQGSLYPSNHDRMLTAVKKKPMASLDGKGDSSWTLARLYHPDSTELQPASSLTSGSPERAEAQYLLVSNGHLPKACDASPESTPLTGQLPGKQRVPLLLAPKS

SEQ ID NO: 475 - protein, 872 aa, Homo sapien
MARPVRGGLGAPRRSPCLLLLWLLLLRLEPVTAAAGPRAPCAAACTCAGDSLDCGGRGLAALPGDLPSWTRSLNLSYNKLSEIDPAGFEDLPNLQEVYLNNNELTAVPSLGAASSHVVSLFLQHNKIRSVEGSQLKAYLSLEVLDLSLNNITEVRNTCFPHGPPIKELNLAGNRIGTLELGAFDGLSRSLLTLRLSKNRITQLPVRAFKLPRLTQLDLNRNRIRLIEGLTFQGLNSLEVLKLQRNNISKLTDGAFWGLSKMHVLHLEYNSLVEVNSGSLYGLTALHQLHLSNNSIARIHRKGWSFCQKLHELVLSFNNLTRLDEESLAELSSLSVLRLSHNSISHIAEGAFKGLRSLRVLDLDHNEISGTIEDTSGAFSGLDSLSKLTLFGNKIKSVAKRAFSGLEGLEHLNLGGNAIRSVQFDAFVKMKNLKELHISSDSFLCDCQLKWLPPWLIGRMLQAFVTATCAHPESLKGQSIFSVPPESFVCDDFLKPQIITQPETTMAMVGKDIRFTCSAASSSSSPMTFAWKKDNEVLTNADMENFVHVHAQDGEVMEYTTILHLRQVTFGHEGRYQCVITNHFGSTYSHKARLTVNVLPSFTKTPHDITIRTTTVARLECAATGHPNPQIAWQKDGGTDFPAARERRMHVMPDDDVFFITDVKIDDAGVYSCTAQNSAGSISANATLTVLETPSLVVPLEDRVVSVGETVALQCKATGNPPPRITWFKGDRPLSLTERHHLTPDNQLLVVQNVVAEDAGRYTCEMSNTLGTERAHSQLSVLPAAGCRKDGTTVGIFTIAVVSSIVLTSLVWVCIIYQTRKKSEEYSVTNTDRSGPASGADFQGGRNGSDAGELGRVPVAFERIALCSELLRV

SEQ ID NO: 476 - protein, 737 aa, Homo sapien
MARPVRGGLGAPRRSPCLLLLWLLLLRLEPVTAAAGPRAPCAAACTCAGDSLDCGGRGLAALPGDLPSWTRSLNLSYNKLSEIDPAGFEDLPNLQEVYLNNNELTAVPSLGAASSHVVSLFLQHNKIRSVEGSQLKAYLSLEVLDLSLNNITEVRNTCFPHGPPIKELNLAGNRIGTLELGAFDGLSRSLLTLRLSKNRITQLPVRAFKLPRLTQLDLNRNRIRLIEGLTFQGLNSLEVLKLQRNNISKLTDGAFWGLSKMHVLHLEYNSLVEVNSGSLYGLTALHQLHLSNNSIARIHRKGWSFCQKLHELVLSFNNLTRLDEESLAELSSLSVLRLSHNSISHIAEGAFKGLRSLRVLDLDHNEISGTIEDTSGAFSGLDSLSKLTLFGNKIKSVAKRAFSGLEGLEHLNLGGNAIRSVQFDAFVKMKNLKELHISSDSFLCDCQLKWLPPWLIGRMLQAFVTATCAHPESLKGQSIFSVPPESFVCDDFLKPQIITQPETTMAMVGKDIRFTCSAASSSSSPMTFAWKKDNEVLTNADMENFVHVHAQDGEVMEYTTILHLRQVTFGHEGRYQCVITNHFGSTYSHKARLTVNVLPSFTKTPHDITIRTTTVARLECAATGHPNPQIAWQKDGGTDFPAARERRMHVMPDDDVFFITDVKIDDAGVYSCTAQNSAGSISANATLTVLGLPIALLCVCVCVCERERETLKCSVWPGVVCVVGLSTLFEIWGCFLS

SEQ ID NO: 477 - protein, 487 aa, Homo sapien
RDSCCAEEPCGTRGCARARALWPRRGDSEAHWGLPARGRPRRPARGLRLCAPSPEEDACRHRARAAGLNACLPGAAAALPSAGVGSGTRRAPGGRRAQAGYTLPESAEFAASEGGPAGPDGRGVCGPRRVLRSGPGTGGTLSAGAAAAERTWGGGHAPVRSLEPSGAPRGPARVCGRSGPHSPRARSSQRAPDKMARPVRGGLGAPRRSPCLLLLWLLLLRLEPVTAAAGPRAPCAAACTCAGDSLDCGGRGLAALPGDLPSWTRSLNLSYNKLSEIDPAGFEDLPNLQEVYLNNNELTAVPSLGAASSHVVSLFLQHNKIRSVEGSQLKAYLSLEVLDLSLNNITEVRNTCFPHGPPIKELNLAGNRIGTLELGAFDGLSRSLLTLRLSKNRITQLPVRAFKLPRLTQLDLNRNRIRLIEGLTFQGLNSLEVLKLQRNNISKLTDGAFWGLSKMHVLHLEYNSLVEVNSGSLYGLTALHQLHDGES

SEQ ID NO: 478 - protein, 689 aa, Homo sapien
MARPVRGGLGAPRRSPCLLLLWLLLLRLEPVTAAAGPRAPCAAACTCAGDSLDCGGRGLAALPGDLPSWTRSLNLSYNKLSEIDPAGFEDLPNLQEVYLNNNELTAVPSLGAASSHVVSLFLQHNKIRSVEGSQLKAYLSLEVLDLSLNNITEVRNTCFPHGPPIKELNLAGNRIGTLELGAFDGLSRSLLTLRLSKNRITQLPVRAFKLPRLTQLDLNRNRIRLIEGLTFQGLNSLEVLKLQRNNISKLTDGAFWGLSKMHVLHLEYNSLVEVNSGSLYGLTALHQLHLSNNSIARIHRKGWSFCQKLHELVLSFNNLTRLDEESLAELSSLSVLRLSHNSISHIAEGAFKGLRSLRVLDLDHNEISGTIEDTSGAFSGLDSLSKLTLFGNKIKSVAKRAFSGLEGLEHLNLGGNAIRSVQFDAFVKMKNLKELHISSDSFLCDCQLKWLPPWLIGRMLQAFVTATCAHPESLKGQSIFSVPPESFVCDDFLKPQIITQPETTMAMVGKDIRFTCSAASSSSSPMTFAWKKDNEVLTNADMENFVHVHAQDGEVMEYTTILHLRQVTFGHEGRYQCVITNHFGSTYSHKARLTVNVLPSFTKTPHDITIRTTTVARLECAATGHPNPQIAWQKDGGTDFPAARERRMHVMPDDRTAPRETEGATAVGTKKLGFVYLSSCHTNLYGKER

SEQ ID NO: 479 - protein, 946 aa, Homo sapien
MARPVRGGLGAPRRSPCLLLLWLLLLRLEPVTAAAGPRAPCAAACTCAGDSLDCGGRGLAALPGDLPSWTRSLNLSYNKLSEIDPAGFEDLPNLQEVYLNNNELTAVPSLGAASSHVVSLFLQHNKIRSVEGSQLKAYLSLEVLDLSLNNITEVRNTCFPHGPPIKELNLAGNRIGTLELGAFDGLSRSLLTLRLSKNRITQLPVRAFKLPRLTQLDLNRNRIRLIEGLTFQGLNSLEVLKLQRNNISKLTDGAFWGLSKMHVLHLEYNSLVEVNSGSLYGLTALHQLHLSNNSIARIHRKGWSFCQKLHELVLSFNNLTRLDEESLAELSSLSVLRLSHNSISHIAEGAFKGLRSLRVLDLDHNEISGTIEDTSGAFSGLDSLSKLTLFGNKIKSVAKRAFSGLEGLEHLNLGGNAIRSVQFDAFVKMKNLKELHISSDSFLCDCQLKWLPPWLIGRMLQAFVTATCAHPESLKGQSIFSVPPESFVCDDFLKPQIITQPETTMAMVGKDIRFTCSAASSSSSPMTFAWKKDNEVLTNADMENFVHVHAQDGEVMEYTTILHLRQVTFGHEGRYQCVITNHFGSTYSHKARLTVNVLPSFTKTPHDITIRTTTVARLECAATGHPNPQIAWQKDGGTDFPAARERRMHVMPDDDVFFITDVKIDDAGVYSCTAQNSAGSISANATLTVLETPSLVVPLEDRVVSVGETVALQCKATGNPPPRITWFKGDRPLSLTERHHLTPDNQLLVVQNVVAEDAGRYTCEMSNTLGTERAHSQLSVLPAAGCRKDGTTVGIFTIAVVSSIVLTSLVWVCIIYQTRKKSEEYSVTNTDETVVPPDVPSYLSSQGTLSDRQETVVRTEGGPQANGHIESNGKASVTVKQSSAVTVSLGAGGGLQVFTGQVPGIRWGKLGEVEGGMTKGCYFGPSLHEFCKVLKSCPLRKPLDWA

SEQ ID NO: 480 - protein, 726 aa, Homo sapien
MARPVRGGLGAPRRSPCLLLLWLLLLRLEPVTAAAGPRAPCAAACTCAGDSLDCGGRGLAALPGDLPSWTRSLNLSYNKLSEIDPAGFEDLPNLQEVYLNNNELTAVPSLGAASSHVVSLFLQHNKIRSVEGSQLKAYLSLEVLDLSLNNITEVRNTCFPHGPPIKELNLAGNRIGTLELGAFDGLSRSLLTLRLSKNRITQLPVRAFKLPRLTQLDLNRNRIRLIEGLTFQGLNSLEVLKLQRNNISKLTDGAFWGLSKMHVLHLEYNSLVEVNSGSLYGLTALHQLHLSNNSIARIHRKGWSFCQKLHELVLSFNNLTRLDEESLAELSSLSVLRLSHNSISHIAEGAFKGLRSLRVLDLDHNEISGTIEDTSGAFSGLDSLSKLTLFGNKIKSVAKRAFSGLEGLEHLNLGGNAIRSVQFDAFVKMKNLKELHISSDSFLCDCQLKWLPPWLIGRMLQAFVTATCAHPESLKGQSIFSVPPESFVCDDFLKPQIITQPETTMAMVGKDIRFTCSAASSSSSPMTFAWKKDNEVLTNADMENFVHVHAQDGEVMEYTTILHLRQVTFGHEGRYQCVITNHFGSTYSHKARLTVNVLPSFTKTPHDITIRTTTVARLECAATGHPNPQIAWQKDGGTDFPAARERRMHVMPDDDVFFITDVKIDDAGVYSCTAQNSAGSISANATLTVLETPSLVVPLEDRVVSVGETVALQCKATGNPPPRSPQ

SEQ ID NO: 481 - protein, 604 aa, Homo sapien
MARPVRGGLGAPRRSPCLLLLWLLLLRLEPVTAAAGPRAPCAAACTCAGDSLDCGGRGLAALPGDLPSWTRSLNLSYNKLSEIDPAGFEDLPNLQEVYLNNNELTAVPSLGAASSHVVSLFLQHNKIRSVEGSQLKAYLSLEVLDLSLNNITEVRNTCFPHGPPIKELNLAGNRIGTLELGAFDGLSRSLLTLRLSKNRITQLPVRAFKLPRLTQLDLNRNRIRLIEGLTFQGLNSLEVLKLQRNNISKLTDGAFWGLSKMHVLHLEYNSLVEVNSGSLYGLTALHQLHLSNNSIARIHRKGWSFCQKLHELVLSFNNLTRLDEESLAELSSLSVLRLSHNSISHIAEGAFKGLRSLRVLDLDHNEISGTIEDTSGAFSGLDSLSKLTLFGNKIKSVAKRAFSGLEGLEHLNLGGNAIRSVQFDAFVKMKNLKELHISSDSFLCDCQLKWLPPWLIGRMLQAFVTATCAHPESLKGQSIFSVPPESFVCDDFLKPQIITQPETTMAMVGKDIRFTCSAASSSSSPMTFAWKKDNEVLTNADMENFVHVHAQDGEVMEYTTILHLRQVTFGHEGRYQCVITNHFGSTYSHKARLTVNGMETPSLL

SEQ ID NO: 482 - protein, 506 aa, Homo sapien
RDSCCAEEPCGTRGCARARALWPRRGDSEAHWGLPARGRPRRPARGLRLCAPSPEEDACRHRARAAGLNACLPGAAAALPSAGVGSGTRRAPGGRRAQAGYTLPESAEFAASEGGPAGPDGRGVCGPRRVLRSGPGTGGTLSAGAAAAERTWGGGHAPVRSLEPSGAPRGPARVCGRSGPHSPRARSSQRAPDKMARPVRGGLGAPRRSPCLLLLWLLLLRLEPVTAAAGPRAPCAAACTCAGDSLDCGGRGLAALPGDLPSWTRSLNLSYNKLSEIDPAGFEDLPNLQEVYLNNNELTAVPSLGAASSHVVSLFLQHNKIRSVEGSQLKAYLSLEVLDLSLNNITEVRNTCFPHGPPIKELNLAGNRIGTLELGAFDGLSRSLLTLRLSKNRITQLPVRAFKLPRLTQLDLNRNRIRLIEGLTFQGLNSLEVLKLQRNNISKLTDGAFWGLSKMHVLHLEYNSLVEVNSGSLYGLTALHQLHLSNNSIARIHRKGWSFCQKLHEL

SEQ ID NO: 483 - protein, 207 aa, Homo sapien
RGAEERAEPRLRARARLWPRRGDSEAHWGSQRGAARRQPEVYGCARPKEDAAARPGCGAERLSSRRSGSTALGGVGSGTRRAPGGRRAQAGYTLSESAEFAASEGGRRPGWARVAAPTGAPERPGTGGTLECRNRGRRENLGRWPCPGAESRAESERPRVPGRSAASGSHSPRRRSSSALQTKMARRSGKGSEARCVRLPSPLLVGK

SEQ ID NO: 484 - protein, 50 aa, Homo sapien
MIGLVTYLLLAAFSSLSHFCLPLLYLSNKYLYLNPYSRIRQIGPNLGNPH

SEQ ID NO: 485 - protein, 52 aa, Homo sapien
METFSRDRQLINSRSTLFHIHLSIFASFEVLGILLSDFSSHLLGICCLLKNF

SEQ ID NO: 486 - protein, 35 aa, Homo sapien
MAMNKILNRLFFLGPKRSNWALHPNYFTLQAEGFR

SEQ ID NO: 487 - protein, 69 aa, Homo sapien [sequence omitted]

SEQ ID NO: 488 - protein, 73 aa, Homo sapien
MKFHLRGSKQAAVACASTACEIPSLKYSSPHLDLFPILCKQVHVARFGSRLCRSRCLSLSGVLPSLVLCKETT

SEQ ID NO: 489 - protein, 68 aa, Homo sapien
MVFSFSFQTRLGFSHLRLYSSCPPHWNALPFFLGCPFSIQFPRPGLSPTSCLRPSLLTLTHSDLPGHS

SEQ ID NO: 490 - protein, 33 aa, Homo sapien [sequence omitted]

SEQ ID NO: 491 - protein, 69 aa, Homo sapien
MSSPIGLLRSGNREFPNCLGCTLYSVVLFTTAVICLFILMRLLSLSFNLQLYHSCQLWEHLCQGKASKY

SEQ ID NO: 492 - protein, 140 aa, Homo sapien
MAVVLPAVVEELLSEMAAAVQESARIPDEYLLSLKFLFGSSATQALDLVDRQSITLISSPSGRRVYQVLGSSSKTYTCLASCHYCSCPAFAFSVLRKSDSILCKHLLAVYLSQVMRTCQQLSVSDKQLTDILLMEKKQEA

SEQ ID NO: 493 - protein, 85 aa, Homo sapien
MDCRSTRSKAWVADEPKRNFSDNRYSSGRPRSRTSRALLHRRRHLAQELLHNRRQHYGHRAAGHALHDRRTAATLQLTAPTCGGS

SEQ ID NO: 494 - protein, 76 aa, Homo sapien
MKSHGKEVKWIFRHFMLLSLFPPGLQEVLWVGAVGCGGFVYDEKPCTVFSRNNLSQSLRRFGKKCPWMESRLLKFK

SEQ ID NO: 495 - protein, 57 aa, Homo sapien
MLLSLFPPGLQEVLWVGAVGCGGFVYDEKPCTVFSRNTLSQSLRRFGKKCPWMESRF

SEQ ID NO: 496 - protein, 140 aa, Homo sapien; identical to SEQ ID NO: 492

SEQ ID NO: 497 - protein, 84 aa, Homo sapien
MSCFCFMVWTLMKLARLKGIGEGTHAPCEGQVWRQAVSQVVQRYTTWLKVGYAKLSTSNLVHIFMGPSNSPVPTSGIPFFSFSK

SEQ ID NO: 498 - protein, 88 aa, Homo sapien
MFWGHKHRAFLGCKITYIICLSTASTPSAVSLQQYYMLMKCCRQGIPVLLGSSSGCGQLYHKFLSSYAEIDFIFIFTYYCFFALSVSN

SEQ ID NO: 499 - protein, 72 aa, Homo sapien
APRRHSVSPCPGGGSGSSTGRRSQLERRGGPPVVEGVSCGAMAVVLPAVVEELLSEMAAAVQESARSTGPSS

SEQ ID NO: 500 - protein, 134 aa, Homo sapien
APRRHSVSPCPGGGSGSSTVPDEYLLSLKFLFGSSATQALDLVDRQSITLISSPSGRRVYQVLGSSSKTYTCLASCHYCSCPAFAFSVLRKSDSILCKHLLAVYLSQVMRTCQQLSVSDKQLTDILLMEKKQEA

SEQ ID NO: 501 - protein, 69 aa, Homo sapien [sequence omitted]

SEQ ID NO: 502 - protein, 75 aa, Homo sapien
MPCPSMWQCGTCSSSPWPQPWPNIDLLNTACWRISWEGLWWPHPALSRHGDLPSTPGLETSESTLKSLGWDGQPR

SEQ ID NO: 503 - protein, 52 aa, Homo sapien
MGWILISVSVSESWFYDPRALCVLQTRVLKQDRTIELSIPSKKLLKAHAHCR

SEQ ID NO: 504 - protein, 43 aa, Homo sapien
MWFISLHFILTNTVVKLPIEDRVIIHVISSKELMASFRSSPKG

SEQ ID NO: 505 - protein, 107 aa, Homo sapien
MGSAGKVEVGPKKTGTFYWVKQPGSDFLAQSVLAKPFSPIRLPMGDSLPCSGASPLTALPSISNTLLLLTPSSRKPSQTSHLGFPISPSQCTWGHPGHAHYRCLDLR

SEQ ID NO: 506 - protein, 107 aa, Homo sapien
MGSAGKVEVGPKKTGTFYWVKQPGSDFLAQPVLAKPFSPIRLPMGDSLPCSGASPLTALPSISNTLLLLTPSSRKPSQTSHLGFPISPSQCTWGHPGHAHYRCLDLR

SEQ ID NO: 507 - protein, 107 aa, Homo sapien; identical to SEQ ID NO: 506

SEQ ID NO: 508 - protein, 35 aa, Homo sapien
MLTLSTMYIDSTIIVPHFTDEKRTSLVECPTTIRW

SEQ ID NO: 509 - protein, 55 aa, Homo sapien
MLTVVRRESCLRKKQNGVRVRRKHVAELLCTFADFPVLLEVSPFTGMVRRKISTW

SEQ ID NO: 510 - protein, 117 aa, Homo sapien
MRGRGRVPGAGGAGWVARPPPSGRPRAPTPQDPGRSPESASPLLARPAAPARSRLTVTQQARRLREATGHFEKGSGEARSGRACGARRCGIGRMAGVVFGARRRHWAAAWRDWPVCG

SEQ ID NO: 511 - protein, 135 aa, Homo sapien
RQRHPQTGQSRQAAAQWRRRAPKTTPAIRPIPPRRAPQARPLLASPLPFSKCPVASRRRRACWVTVRRLRAGAAGRARSGEADSGLRPGSCGVGARGRPEGGGLATHPAPPAPGTRPRPRILRAPGGLHLKTTCF

SEQ ID NO: 512 - protein, 73 aa, Homo sapien
MICPQGIFISFPCERDIKNSDSKTTLKIKSNQIHKHTPIPPLPQWFLLSMFSREIKSHIQRWKIRFVIRSLPR

SEQ ID NO: 513 - protein, 100 aa, Homo sapien [sequence omitted]

SEQ ID NO: 514 - protein, 42 aa, Homo sapien
MTARRQGDSTEGGFWLCHLMRMLKEVERNRAGTYYLTLRNCN

SEQ ID NO: 515 - protein, 61 aa, Homo sapien
MSSDLQGRRGWLCQYENTHSAGDQKGGTAGYSERVLSLQANSPGLKSGLNHLILYASGQVT

SEQ ID NO: 516 - protein, 63 aa, Homo sapien
MWLSPYEHFYCVQINFRNWFPQTSGCFLPAHVSCLLDDANHSSLHAPSVISRASVISRATGIC

SEQ ID NO: 517 - protein, 118 aa, Homo sapien
MWLSPYEHFYCVQINFRNWFPQTSGCFLPAHVSCLLDDANHSSLHAPSVISRASVISRATGICLSILGFRKFPPNQTQIQLKIKKGVKCDTTNSQISISRRPHPRGTKWSRGGGDPFH

SEQ ID NO: 518 - protein, 277 aa, Homo sapien
MFILSLSFLTVFIFAFVITHVILRSQQTGFLNALKDSPASVLEAVVCFFSVWSIVGLSGFHTYLISSNQTTNEDIKGSWSNKRGKENYNPYSYGNIFTNCCVALCGPISPSLIDRRGYIQPDTPQPAAPSNGITMYGATQSQSDMCDQDQCIQSTKFVLQAAATPLLQSEPSLTSDELHLPGKPGLGTPCASLTLGPPTPPASMPNLAEATLADVMPRKDEHMGHQFLTPDEAPSPPRLLAAGSPLAHSRTMHVLGLASQDSLHEDSVRGLVKLSSV

SEQ ID NO: 519 - protein, 143 aa, Homo sapien
MYGATQSQSDMCDQDQCIQSTKFVLQAAATPLLQSEPSLTSDELHLPGKPGLGTPCASLTLGPPTPPASMPNLAEATLADVMPRKDEHMGHQFLTPDEAPSPPRLLAAGSPLAHSRTMHVLGLASQDSLHEDSVRGLVKLSSV

SEQ ID NO: 520 - protein, 118 aa, Homo sapien
MPPGGGGPMKDCEYSQISTHSSSPMESPHKKKKIAARRKWEVFPGRNKFFCNGRIMMARQTGVFYLTLVLILVTSGLFFAFEERNSVVIMTPLKRWLIASPLTSTREEEKLYVSDSKH

SEQ ID NO: 521 - protein, 356 aa, Homo sapien [sequence omitted]

SEQ ID NO: 522 - protein, 119 aa, Homo sapien [sequence omitted]

SEQ ID NO: 523 - protein, 1566 aa, Homo sapien
MVFTQAPAEIMGHLRIRSLLARQCLAEFLGVFVLMLLTQGAVAQAVTSGETKGNFFTMFLAGSLAVTIAIYVGGNVSGAHLNPAFSLAMCIVGRLPWVKLPIYILVQLLSAFCASGATYVLYHDALQNYTGGNLTVTGPKETASIFATYPAPYLSLNNGFLDQVLGTGMLIVGLLAILDRRNKGVPAGLEPVVVGMLILALGLSMGANCGIPLNPARDLGPRLFTYVAGWGPEVFSAGNGWWWVPVVAPLVGATVGTATYQLLVALHHPEGPEPAQDLVSAQHKASELETPASAQMLECKLGLGQPSLHSWTLEPATDPAWEQQSFFLFVECARTWEASLFICLASLPPKLRRILDREKWRRIRVSHGIAGILLGEMAVCAKKRPPEEERRARANDREYNEKFQYASNCIKTSKYNILTFLPVNLFEQFQEVANTYFLFLLILQLIPQISSLSWFTTIVPLVLVLTITAVKDATDDYFRHKSDNQVNNRQSQVLINGILQQEQWMNVCVGDIIKLENNQFVAADLLLLSSSEPHGLCYIETAELDGETNMKVRQAIPVTSELGDISKLAKFDGEVICEPPNNKLDKFSGTLYWKENKFPLSNQNMLLRGCVLRNTEWCFGLVIFAGPDTKLMQNSGRTKFKRTSIDRLMNTLVLWIFGFLVCMGVILAIGNAIWEHEVGMRFQVYLPWDEAVDSAFFSGFLSFWSYIIILNTVVPISLYVSVEVIRLGHSYFINWDKKMFCMKKRTPAEARTTTLNEELGQVEYIFSDKTGTLTQNIMVFNKCSINGHSYGDVFDVLGHKAELGERPEPVDFSFNPLADKKFLFWDPSLLEAVKIGDPHTHEFFRLLSLCHTVMSEEKNEGELYYKAQSPDEGALVTAARNFGFVFRSRTPKTITVHEMGTAITYQLLAILDFNNIRKRMSVIVRNPEGKIRLYCKGADTILLDRLHHSTQELLNTTMDHLNEYAGEGLRTLVLAYKDLDEEYYEEWAERRLQASLAQDSREDRLASIYEEVENNMMLLGATAIEDKLQQGVPETIALLTLANIKIWVLTGDKQETAVNIGYSCKMLTDDMTEVFIVTGHTVLEVREELRKAREKMMDSSRSVGNGFTYQDKLSSSKLTSVLEAVAGEYALVINGHSLAHALEADMELEFLETACACKAVICCRVTPLQKAQVVELVKKYKKAVTLAIGDGANDVSMIKTAHIGVGISGQEGIQAVLASDYSFSQFKFLQRLLLVHGRWSYLRMCKFLCYFFYKNFAFTMVHFWFGFFCGFSAQTVYDQYFITLYNIVYTSLPVLAMGVFDQDVPEQRSMEYPKLYEPGQLNLLFNKREFFICIAQGIYTSVLMFFIPYGVFADATRDDGTQLADYQSFAVTVATSLVIVVSVQIGLDTGYWTAINHFFIWGSLAVYFAILFAMHSNGLFDMFPNQFRFVGNAQNTLAQPTVWLTIVLTTVVCIMPVVAFRFLRLNLKPDLSDTVRYTQLVRKKQKAQHRCMRRVGRTGSRRSGYAFSHQEGFGELIMSGKNMRLSSLALSSFTTRSSSSWIESLRRKKSDSASSPSGGADKPLKG

SEQ ID NO: 524 - protein, 1061 aa, Homo sapien
MRCAIVKWWCSADAQGPLPLESAPQPCPVFRIRNVVPQAQGGRSAPSLWWDSDEWASSLLHFPSPVPPLFEVASVLLWHAQHPHYFSLSFLSPPSGTFSCFSLHGFCIISPEVRTGRVPCLQPLFLLCCLSCPPRPFAPSCLESIRRVGSGRSSAGCVQPAPPSGSPCPFPPRFLCPGVFSVLVSPQAEGLQRRPMWVGHLLFFPTQASPLVTLCSVEVIRLGHSYFINWDKKMFCMKKRTPAEARTTTLNEELGQVEYIFSDKTGTLTQNIMVFNKCSINGHSYGDVFDVLGHKAELGERPEPVDFSFNPLADKKFLFWDPSLLEAVKIGDPHTHEFFRLLSLCHTVMSEEKNEGELYYKAQSPDEGALVTAARNFGFVFRSRTPKTITVHEMGTAITYQLLAILDFNNIRKRMSVIVRNPEGKIRLYCKGADTILLDRLHHSTQELLNTTMDHLNEYAGEGLRTLVLAYKDLDEEYYEEWAERRLQASLAQDSREDRLASIYEEVENNMMLLGATAIEDKLQQGVPETIALLTLANIKIWVLTGDKQETAVNIGYSCKMLTDDMTEVFIVTGHTVLEVREELRKAREKMMDSSRSVGNGFTYQDKLSSSKLTSVLEAVAGEYALVINGHSLAHALEADMELEFLETACACKAVICCRVTPLQKAQVVELVKKYKKAVTLAIGDGANDVSMIKTAHIGVGISGQEGIQAVLASDYSFSQFKFLQRLLLVHGRWSYLRMCKFLCYFFYKNFAFTMVHFWFGFFCGFSAQTVYDQYFITLYNIVYTSLPVLAMGVFDQDVPEQRSMEYPKLYEPGQLNLLFNKREFFICIAQGIYTSVLMFFIPYGVFADATRDDGTQLADYQSFAVTVATSLVIVVSVQIGLDTGYWTAINHFFIWGSLAVYFAILFAMHSNGLFDMFPNQFRFVGNAQNTLAQPTVWLTIVLTTVVCIMPVVAFRFLRLNLKPDLSDTVRYTQLVRKKQKAQHRCMRRVGRTGSRRSGYAFSHQEGFGELIMSGKNMRLSSLALSSFTTRSSSSWIESLRRKKSDSASSPSGGADKPLKG

SEQ ID NO: 525 - protein, 1079 aa, Homo sapien
MKVRQAIPVTSELGDISKLAKFDGEVICEPPNNKLDKFSGTLYWKENKFPLSNQNMLLRGCVLRNTEWCFGLVIFAGPDTKLMQNSGRTKFKRTSIDRLMNTLVLWIFGFLVCMGVILAIGNAIWEHEVGMRFQVYLPWDEAVDSAFFSGFLSFWSYIIILNTVVPISLYVSVEVIRLGHSYFINWDKKMFCMKKRTPAEARTTTLNEELGQVEYIFSDKTGTLTQNIMVFNKCSINGHSYGDVFDVLGHKAELGERPEPVDFSFNPLADKKFLFWDPSLLEAVKIGDPHTHEFFRLLSLCHTVMSEEKNEGELYYKAQSPDEGALVTAARNFGFVFRSRTPKTITVHEMGTAITYQLLAILDFNNIRKRMSVIVRNPEGKIRLYCKGADTILLDRLHHSTQELLNTTMDHLNEYAGEGLRTLVLAYKDLDEEYYEEWAERRLQASLAQDSREDRLASIYEEVENNMMLLGATAIEDKLQQGVPETIALLTLANIKIWVLTGDKQETAVNIGYSCKMLTDDMTEVFIVTGHTVLEVREELRKAREKMMDSSRSVGNGFTYQDKLSSSKLTSVLEAVAGEYALVINGHSLVGIAILSLGSIFPVSTSVQGFYILFYISPDFREDWSQRGLGGAETPRCLLERPALSGFSVLQAHALEADMELEFLETACACKAVICCRVTPLQKAQVVELVKKYKKAVTLAIGDGANDVSMIKTAHIGVGISGQEGIQAVLASDYSFSQFKFLQRLLLVHGRWSYLRMCKFLCYFFYKNFAFTMVHFWFGFFCGFSAQTVYDQYFITLYNIVYTSLPVLAMGVFDQDVPEQRSMEYPKLYEPGQLNLLFNKREFFICIAQGIYTSVLMFFIPYGVFADATRDDGTQLADYQSFAVTVATSLVIVVSVQIGLDTGYWTAINHFFIWGSLAVYFAILFAMHSNGLFDMFPNQFRFVGNAQNTLAQPTVWLTIVLTTVVCIMPVVAFRFLRLNLKPDLSDTVRYTQLVRKKQKAQHRCMRRVGRTGSRRSGYAFSHQEGFGELIMSGKNMRLSSLALSSFTTRSSSSWIESLRRKKSDSASSPSGGADKPLKG

SEQ ID NO: 526 - protein, 1157 aa, Homo sapien
MKVRQAIPVTSELGDISKLAKFDGEVICEPPNNKLDKFSGTLYWKENKFPLSNQNMLLRGCVLRNTEWCFGLVIFAGPDTKLMQNSGRTKFKRTSIDRLMNTLVLWIFGFLVCMGVILAIGNAIWEHEVGMRFQVYLPWDEAVDSAFFSGFLSFWSYIIILNTVVPISLYVSVEVIRLGHSYFINWDKKMFCMKKRTPAEARTTTLNEELGQVEYIFSDKTGTLTQNIMVFNKCSINGHSYGDVFDVLGHKAELGERPEPVDFSFNPLADKKFLFWDPSLLEAVKIGDPHTHEFFRLLSLCHTVMSEEKNEGELYYKAQSPDEGALVTAARNFGFVFRSRTPKTITVHEMGTAITYQLLAILDFNNIRKRMSVIVRNPEGKIRLYCKGADTILLDRLHHSTQELLNTTMDHLNEYAGEGLRTLVLAYKDLDEEYYEEWAERRLQASLAQDSREDRLASIYEEVENNMMLLGATAIEDKLQQGVPETIALLTLANIKIWVLTGDKQETAVNIGYSCKMLTDDMTEVFIVTGHTVLEVREELRKAREKMMDSSRSVGNGFTYQDKLSSSKLTSVLEAVAGEYALVINGHSLAHALEADMELEFLETACACKAVICCRVTPLQKAQVVELVKKYKKAVTLAIGDGANDVSMIKSECGLCRCVAGLEAGEGPTEVSGLQKNDGKGVVTWKALKCVAGGIFTLLSSLVSAAAHIGVGISGQEGIQAVLASDYSFSQFKFLQRLLLVHGRWSYLRMCKFLCYFFYKNFAFTMVHFWFGFFCGFSAQVINVPSPLLCKSVNLRAEVLSCLSLSPPGPSYFLVHTLKKCLLKEERRSLRKFLQGSLYVTSAVFLCLMCSKERLHAPLLPVLFQTVYDQYFITLYNIVYTSLPVLAMGVFDQDVPEQRSMEYPKLYEPGQLNLLFNKREFFICIAQGIYTSVLMFFIPYGVFADATRDDGTQLADYQSFAVTVATSLVIVVSVQIGLDTGYWTAINHFFIWGSLAVYFAILFAMHSNGLFDMFPNQFRFVGNAQNTLAQPTVWLTIVLTTVVCIMPVVAFRFLRLNLKPDLSDTVRYTQLVRKKQKAQHRCMRRVGRTGSRRSGYAFSHQEGFGELIMSGKNMRLSSLALSSFTTRSSSSWIESLRRKKSDSASSPSGGADKPLKG

SEQ ID NO: 527 - protein, 529 aa, Homo sapien
MVFTQAPAEIMGHLRIRSLLARQCLAEFLGVFVLMLLTQGAVAQAVTSGETKGNFFTMFLAGSLAVTIAIYVGGNVSGAHLNPAFSLAMCIVGRLPWVKLPIYILVQLLSAFCASGATYVLYHDALQNYTGGNLTVTGPKETASIFATYPAPYLSLNNGFLDQVLGTGMLIVGLLAILDRRNKGVPAGLEPVVVGMLILALGLSMGANCGIPLNPARDLGPRLFTYVAGWGPEVFSAGNGWWWVPVVAPLVGATVGTATYQLLVALHHPEGPEPAQDLVSAQHKASELETPASAQMLECKLGLGQPSLHSWTLEPATDPAWEQQSFFLFVECARTWEASLFICLASLPPKLRRILDREKWRRIRVSHGIAGILLGEMAVCAKKRPPEEERRARANDREYNEKFQYASNCIKTSKYNILTFLPVNLFEQFQEVANTYFLFLLILQLIPQISSLSWFTTIVPLVLVLTITAVKDATDDYFRHKSDNQVNNRQSQVLINGILQQEQWMNVCVGDIIKLENNQFVAVRDRVPL

SEQ ID NO: 528 - protein, 134 aa, Homo sapien [sequence omitted]

SEQ ID NO: 529 - protein, 1102 aa, Homo sapien
MKVRQAIPVTSELGDISKLAKFDGEVICEPPNNKLDKFSGTLYWKENKFPLSNQNMLLRGCVLRNTEWCFGLVIFAGPDTKLMQNSGRTKFKRTSIDRLMNTLVLWIFGFLVCMGVILAIGNAIWEHEVGMRFQVYLPWDEAVDSAFFSGFLSFWSYIIILNTVVPISLYVSVEVIRLGHSYFINWDKKMFCMKKRTPAEARTTTLNEELGQVEYIFSDKTGTLTQNIMVFNKCSINGHSYGDVFDVLGHKAELGERPEPVDFSFNPLADKKFLFWDPSLLEAVKIGDPHTHEFFRLLSLCHTVMSEEKNEGELYYKAQSPDEGALVTAARNFGFVFRSRTPKTITVHEMGTAITYQLLAILDFNNIRKRMSVIVRNPEGKIRLYCKGADTILLDRLHHSTQELLNTTMDHLNEYAGEGLRTLVLAYKDLDEEYYEEWAERRLQASLAQDSREDRLASIYEEVENNMMLLGATAIEDKLQQGVPETIALLTLANIKIWVLTGDKQETAVNIGYSCKMLTDDMTEVFIVTGHTVLEVREELRKAREKMMDSSRSVGNGFTYQDKLSSSKLTSVLEAVAGEYALVINGHSLAHALEADMELEFLETACACKAVICCRVTPLQKAQVVELVKKYKKAVTLAIGDGANDVSMIKTAHIGVGISGQEGIQAVLASDYSFSQFKFLQRLLLVHGRWSYLRMCKFLCYFFYKNFAFTMVHFWFGFFCGFSAQVINVPSPLLCKSVNLRAEVLSCLSLSPPGPSYFLVHTLKKCLLKEERRSLRKFLQGSLYVTSAVFLCLMCSKERLHAPLLPVLFQTVYDQYFITLYNIVYTSLPVLAMGVFDQDVPEQRSMEYPKLYEPGQLNLLFNKREFFICIAQGIYTSVLMFFIPYGVFADATRDDGTQLADYQSFAVTVATSLVIVVSVQIGLDTGYWTAINHFFIWGSLAVYFAILFAMHSNGLFDMFPNQFRFVGNAQNTLAQPTVWLTIVLTTVVCIMPVVAFRFLRLNLKPDLSDTVRYTQLVRKKQKAQHRCMRRVGRTGSRRSGYAFSHQEGFGELIMSGKNMRLSSLALSSFTTRSSSSWIESLRRKKSDSASSPSGGADKPLKG

SEQ ID NO: 530 - protein, 784 aa, Homo sapien
MKVRQAIPVTSELGDISKLAKFDGEVICEPPNNKLDKFSGTLYWKENKFPLSNQNMLLRGCVLRNTEWCFGLVIFAGPDTKLMQNSGRTKFKRTSIDRLMNTLVLWIFGFLVCMGVILAIGNAIWEHEVGMRFQVYLPWDEAVDSAFFSGFLSFWSYIIILNTVVPISLYVSVEVIRLGHSYFINWDKKMFCMKKRTPAEARTTTLNEELGQVEYIFSDKTGTLTQNIMVFNKCSINGHSYGDVFDVLGHKAELGERPEPVDFSFNPLADKKFLFWDPSLLEAVKIGDPHTHEFFRLLSLCHTVMSEEKNEGELYYKAQSPDEGALVTAARNFGFVFRSRTPKTITVHEMGTAITYQLLAILDFNNIRKRMSVIVRNPEGKIRLYCKGADTILLDRLHHSTQELLNTTMDHLNEYAGEGLRTLVLAYKDLDEEYYEEWAERRLQASLAQDSREDRLASIYEEVENNMMLLGATAIEDKLQQGVPETIALLTLANIKIWVLTGDKQETAVNIGYSCKMLTDDMTEVFIVTGHTVLEVREELRKAREKMMDSSRSVGNGFTYQDKLSSSKLTSVLEAVAGEYALVINGHSLAHALEADMELEFLETACACKAVICCRVTPLQKAQVVELVKKYKKAVTLAIGDGANDVSMIKTAHIGVGISGQEGIQAVLASDYSFSQFKFLQRLLLVHGRWSYLRMCKFLCYFFYKNFAFTMVHFWFGFFCGFSAQVINVPSPLLCKSVNLRAEVLSCLSLSPPGPSYFLVHTLKKCLLKEERRSLRKFLRVLCM

SEQ ID NO: 531 - protein, 41 aa, Homo sapien
MYTHGGITIFTVVIPFTSLDHLVIFNVEYATLFQVDTIFSF

SEQ ID NO: 532 - protein, 52 aa, Homo sapien
MPTLSLRKITSPGLQKCPRTPPPLSNPLSFLSPGNTISNCLLIILDFLDGFT

SEQ ID NO: 533 - protein, 24 aa, Homo sapien
MCCSGPSGVNPRSALPFCRKESRT

SEQ ID NO: 534 - protein, 163 aa, Homo sapien
MGTAYVALPQPSSMQWPGSNQRSPGRVSCKNLGKRAQGGCRLLTACLDRPHGASPHIARALASPLPTCKRGCWQQHFTTRNLYSNSKHALTHSVNYPLSWPTEVDSFRPPFVQMRKLRLTPKPGGFQMWSGSLCPGDEGTRRVWSRAGVGLRCSRLAVKGARC

SEQ ID NO: 535 - protein, 13 aa, Homo sapien
MLAFIFPPSCKSH

SEQ ID NO: 536 - protein, 71 aa, Homo sapien
MTFWDERKGLDRVTQHDDRGEACGSALQTEMGELSYSIAICLCFANSLVRTPHCVNPHFLALSLVQVSGEQ

SEQ ID NO: 537 - protein, 52 aa, Homo sapien
MRYQIKNMFPEFSLMIVYHSISLEVCPQASYTILVVFSTKLPPFPYTFAVNF

SEQ ID NO: 538 - protein, 102 aa, Homo sapien [sequence omitted]

SEQ ID NO: 539 - protein, 89 aa, Homo sapien
MATFGDFSLTSFSEWWNWGSLLLSHHCTANHILIFQNTWHPVSSRPENLYKEVTFLKPVRTQINVSLLYKDRVLQSCLCLHPVFNGKQG

SEQ ID NO: 540 - protein, 29 aa, Homo sapien
MANSLQSTSPLQRRVGDCRQLLLIYAAHA

SEQ ID NO: 541 - protein, 184 aa, Homo sapien
MSGRSAQVFCRASGWAGKKQQGAGQSFFSGLTPPCCSPALPPGWMVPGALFPVAPEPLFRIQVVPPSSRLVVMVRTAAFIEKSSCPSTDGPKQGKYNTAGCKSMSQVATLVTEIGGRVMFTKEPFKKDFDWSTLEFSGVPKANLCLLSDYSRSFEQVPTLIFLSFNRIESYLLHFPSSFSILRP

SEQ ID NO: 542 - protein, 373 aa, Homo sapien
MALNVAPVRDTKWLTLEVCRQFQRGTCSRSDEECKFAHPPKSCQVENGRVIACFDSLKGRCSRENCKYLHPPTHLKTQLEINGRNNLIQQKTAAAMLAQQMQFMFPGTPLHPVPTFPVGPAIGTNTAISFAPYLAPVTPGVGLVPTEILPTTPVIVPGSPPVTVPGSTATQKLLRTDKLEVCREFQRGNCARGETDCRFAHPADSTMIDTSDNTVTVCMDYIKGRCMREKCKYFHPPAHLQAKIKAAQHQANQAAVAAQAAAAAATVMTQSTAKAMKRPLEATVDLAFPPGALHPLPKRQALEKSNGTSAVFNPSVLHYQQALTSAQLQQHAAFIPTVPMMHSATSATVSAATTPATSVPFAATATANQIILK

SEQ ID NO: 543 - protein, 385 aa, Homo sapien
MALNVAPVRDTKWLTLEVCRQFQRGTCSRSDEECKFAHPPKSCQVENGRVIACFDSLKGRCSRENCKYLHPPTHLKTQLEINGRNNLIQQKTAAAMLAQQMQFMFPGTPLHPVPTFPVGPAIGTNTAISFAPYLAPVTPGVGLVPTEILPTTPVIVPGSPPVTVPGSTATQKLLRTDKLEVCREFQRGNCARGETDCRFAHPADSTMIDTSDNTVTVCMDYIKGRCMREKCKYFHPPAHLQAKIKAAQHQANQAAVAAQAAAAAATVMTQSTAKAMKRPLEATVDLAFPPGALHPLPKRQALEKSNGTSAVFNPSVLHYQQALTSAQLQQHAAFIPTGSVLCMTPATSIVPMMHSATSATVSAATTPATSVPFAATATANQIILK

SEQ ID NO: 544 - protein, 104 aa, Homo sapien [sequence omitted]

SEQ ID NO: 545 - protein, 136 aa, Homo sapien [sequence omitted]

SEQ ID NO: 546 - protein, 86 aa, Homo sapien
MAFPPGALHPLPKRQALEKSNGTSAVFNPSVLHYQQALTSAQLQQHAAFIPTGMCPYCPTSCALLVMCFLLISLSCLVASSLLLKV

SEQ ID NO: 547 - protein, 355 aa, Homo sapien
MALNVAPVRDTKWLTLEVCRQFQRGTCSRSDEECKFAHPPKSCQVENGRVIACFDSLKGRCSRENCKYLHPPTHLKTQLEINGRNNLIQQKTAAAMLAQQMQFMFPGTPLHPVPTFPVGPAIGTNTAISFAPYLAPVTPGVGLVPTEILPTTPVIVPGSPPVTVPGSTATQKLLRTDKLEVCREFQRGNCARGETDCRFAHPADSTMIDTSDNTVTVCMDYIKGRCMREKCKYFHPPAHLQAKIKAAQHQANQAAVAAQAAAAAATVMAFPPGALHPLPKRQALEKSNGTSAVFNPSVLHYQQALTSAQLQQHAAFIPTVPMMHSATSATVSAATTPATSVPFAATATANQIILK

SEQ ID NO: 548 - protein, 173 aa, Homo sapien
MIDTSDNTVTVCMDYIKGRCMREKCKYFHPPAHLQAKIKAAQHQANQAAVAAQAAAAAATVMTQSTAKAMKRPLEATVDLAFPPGALHPLPKRQALEKSNGTSAVFNPSVLHYQQALTSAQLQQHAAFIPTDNSEIISRNGMECQESALRITKHCYCTYYPVSSSIELPQTAC

SEQ ID NO: 549 - protein, 371 aa, Homo sapien
MALNVAPVRDTKWLTLEVCRQFQRGTCSRSDEECKFAHPPKSCQVENGRVIACFDSLKGRCSRENCKYLHPPTHLKTQLEINGRNNLIQQKTAAAMLAQQMQFMFPGTPLHPVPTFPVGPAIGTNTAISFAPYLAPVTPGVGLVPTEILPTTPVIVPGSPPVTVPGSTATQKLLRTDKLEVCREFQRGNCARGETDCRFAHPADSTMIDTSDNTVTVCMDYIKGRCMREKCKYFHPPAHLQAKIKAAQHQANQAAVAAQAAAAAATVMTQSTAKAMKRPLEATVDLAFPPGALHPLPKRQALEKSNGTSAVFNPSVLHYQQALTSAQLQQHAAFIPTGMCPYCPTSCALLVMCFLLISLSCLVASSLLLKV

SEQ ID NO: 550 - protein, 360 aa, Homo sapien
MALNVAPVRDTKWLTLEVCRQFQRGTCSRSDEECKFAHPPKSCQVENGRVIACFDSLKGRCSRENCKYLHPPTHLKTQLEINGRNNLIQQKTAAAMLAQQMQFMFPGTPLHPVPTFPVGPAIGTNTAISFAPYLAPVTPGVGLVPTEILPTTPVIVPGSPPVTVPGSTATQKLLRTDKLEVCREFQRGNCARGETDCRFAHPADSTMIDTSDNTVTVCMDYIKGRCMREKCKYFHPPAHLQAKIKAAQHQANQAAVAAQAAAAAATVMAFPPGALHPLPKRQALEKSNGTSAVFNPSVLHYQQALTSAQLQQHAAFIPTVPMMHSATSATVSAATTPATSVPFAATATANQIILKYSESK

SEQ ID NO: 551 - protein, 95 aa, Homo sapien [sequence omitted]

SEQ ID NO: 552 - protein, 76 aa, Homo sapien [sequence omitted]

SEQ ID NO: 553 - protein, 33 aa, Homo sapien
MAKNFTLVYDIKLQIQKALQIVNRVNMKKNHIY

SEQ ID NO: 554 - protein, 69 aa, Homo sapien [sequence omitted]

SEQ ID NO: 555 - protein, 161 aa, Homo sapien
  MISC_FEATURE (140)..(141): x=any amino acid
  MISC_FEATURE (160)..(160): x=any amino acid
MPNWGGGKKCGVCQKTVYFAEEVQCEGNSFHKSCFLCMVCKKNLDSTTVAVHGEEIYCKSCYGKKYGPKGYGYGQGAGTLSTDKGESLGIKHEEAPGHRPTTNPNASKFAQKIGGSERCPRCSQAVYAAEKVIGAGKSGXXLLSSASVASWSHWRQVAVXA

SEQ ID NO: 556 - protein, 148 aa, Homo sapien
LGVQRTKGDTYGFLEEELVLASISRVGYADPIPLSSHPLAIPPASICRQFLKDQDIMYAKRPESFSCKKLAMSKKVTPASTQCVRFPFPSTVVCKKNLDSTTVAVHGEEIYCKSCYGKKYGPKGYGYGQGAGTLSTDKGESLGIKHEE

SEQ ID NO: 557 - protein, 160 aa, Homo sapien
MPNWGGGKKCGVCQKTVYFAEEVQCEGNSFHKSCFLCMVCKKNLDSTTVAVHGEEIYCKSCYGKKYGPKGYGYGQGAGTLSTDKGESLGIKHEEAPGHRPTTNPNASKFAQKIGGSERCPRCSQAVYAAEKVIGAGKVRWLLGMRGMGGDIFLKCGFQNF

SEQ ID NO: 558 - protein, 97 aa, Homo sapien
TRVTNDNPAPPSQLPECRTGEEARNVGCVRRRFTLPKRFSAKATASINPASCAWSARRIWTVPLWPCMVRRFTASPATARSMGPKAMATGRAQAPSA

SEQ ID NO: 559 - protein, 88 aa, Homo sapien
MLLPGTKAKLGRHGTQFQVRCRGSALPSMAAQEPQVLGCHLFRCGISRPDSLGVTAEACWSLLAQDTVGERCEAKAIGSTGSTCHLRY

SEQ ID NO: 560 - protein, 60 aa, Homo sapien
MAAQEPQVLGCHLFRCGISRPDSLGVTAEACWSLLAQDTVGERCEAKAIGSTGSTCHLRY

SEQ ID NO: 561 - protein, 50 aa, Homo sapien
MDLRKQSAVSGSKFLITFSKVKYQTFLSLFHTNRWPSYKASDLLSATGMV

SEQ ID NO: 562 - protein, 151 aa, Homo sapien [sequence omitted]

SEQ ID NO: 563 - protein, 151 aa, Homo sapien [sequence omitted]

SEQ ID NO: 564 - protein, 104 aa, Homo sapien
MLHKSLNLTCKVSTVMVATINNIKVFSSGSDSSKFQGSCFPNSSKFVCFPFHLVYLLESFEEPLESDHQLPILILNLTSILAFLLHDATVCMSEDHPIRIISSA

SEQ ID NO: 565 - protein, 515 aa, Homo sapien
MLCSQRRYSLQPVPERRIPNRYLGQPSPFTHPHLLRPGEVTPGLSQVEYALRRHKLMSLIQKEAQGQSGTDQTVVVLSNPTYYMSNDIPYTFHQDNNFLYLCGFQEPDSILVLQSLPGKQLPSHKAILFVPRRDPSRELWDGPRSGTDGAIALTGVDEAYTLEEFQHLLPKMKAETNMVWYDWMRPSHAQLHSDYMQPLTEAKAKSKNKVRGVQQLIQRLRLIKSPAEIERMQIAGKLTSQRQGFSVLSRLSRTPELKQSAHLDLPKCWDYMAFIETMFTSKAPVEEAFLYAKFEFECRARGADILAYPPVVAGGNRSNTLHYVKNNQLIKDGEMVLLDGGCESSCYVSDITRTWPVNGRFTAPQAELYEAVLEIQRDCLALCFPGTSLENIYSMMLTLIGQKLKDLGIMKNIKENNAFKAARKYCPHHVGHYLGMDVHDTPDMPRSLPLQPGMVITIEPGIYIPEDDKDAPEKFRGLGVRIEDDVVVTQDSPLILSADCPKEMNDIEQICSQAS

SEQ ID NO: 566 - protein, 515 aa, Homo sapien
MLCSQRRYSLQPVPERRIPNRYLGQPSPFTHPHLLRPGEVTPGLSQVEYALRRHKLMSLIQKEAQGQSGTDQTVVVLSNPTYYMSNDIPYTFHQDNNFLYLCGFQEPDSILVLQSLPGKQLPSHKAILFVPRRDPSRELWDGPRSGTDGAIALTGVDEAYTLEEFQHLLPKMKAETNMVWYDWMRPSHAQLHSDYMQPLTEAKAKSKNKVRGVQQLIQRLRLIKSPAEIERMQIAGKLTSQRRVSQCCPGWSRTPELKQSAHLDLPKCWDYMAFIETMFTSKAPVEEAFLYAKFEFECRARGADILAYPPVVAGGNRSNTLHYVKNNQLIKDGEMVLLDGGCESSCYVSDITRTWPVNGRFTAPQAELYEAVLEIQRDCLALCFPGTSLENIYSMMLTLIGQKLKDLGIMKNIKENNAFKAARKYCPHHVGHYLGMDVHDTPDMPRSLPLQPGMVITIEPGIYIPEDDKDAPEKFRGLGVRIEDDVVVTQDSPLILSADCPKEMNDIEQICSQAS

SEQ ID NO: 567 - protein, 102 aa, Homo sapien
LARFPGDAALQAVAFPVVTLFLFPTRELGRNALAALSPQAGSRCSKRPRPLRRHYVCMSTCARACMWRRCRRREREITNATAAYSTSGLVLLEGDEKIRKVR

SEQ ID NO: 568 - protein, 77 aa, Homo sapien
MVDPSRWMIAVQRRAPGLKLTPEGGEGVGHVKGTCARTLRLSTAQQIFKPSFEIPQVCPLISLPHFSRMRYPSPQAF

SEQ ID NO: 569 - protein, 29 aa, Homo sapien
MLDIRNRTKTGLFTNLWKLKNILLTSRSK

SEQ ID NO: 570 - protein, 40 aa, Homo sapien
MQVYINRCDSHVVIQAPRVPSLDLRFQECCAHLQAACRKE

SEQ ID NO: 571 - protein, 89 aa, Homo sapien [sequence omitted]

SEQ ID NO: 572 - protein, 51 aa, Homo sapien
MLPFPNISIKGYLRLAKCYMSQSRWGTESVLNLPPLMLRALFCFIYEAFLY

SEQ ID NO: 573 - protein, 63 aa, Homo sapien
MDRGGERSPSFTQPLLLRWRLYLGRGAAKKSGALITLAPAHQQEFHPERGRPRRPGAAAYPLH

SEQ ID NO: 574 - protein, 839 aa, Homo sapien
MASAELQGKYQKLAQEYSKLRAQNQVLKKGVVDEQANSAALKEQLKMKDQSLRKLQQEMDSLTFRNLQLAKRVELLQDELALSEPRGKKNKKSGESSSQLSQEQKSVFDEDLQKKIEENERLHIQFFEADEQHKHVEAELRSRLATLETEAAQHQAVVDGLTRKYMETIEKLQNDKAKLEVSPIDESTLKNSYSFCINKLSIHLELVISGETFACRVLLSVLLSVVAWAICVSFSSEIQVKSQTLEKEAKECRLRTEECQLQLKTLHEDLSGRLEESLSIINEKVPFNDTKYSQYNALNVPLHNRRHQLKMRDIAGQALAFVQDLVTALLNFHTYTEQRIQIFPVDSAIDTISPLNQKFSQYLHENASYVRPLEEGMLHLFESITEDTVTVLETTVKLKTFSEHLTSYICFLRKILPYQLKSLEEECESSLCTSALRARNLELSQDMKKMTAVFEKLQTYIALLALPSTEPDGLLRTNYSSVLTNVGAALHGFHDVMKDISKHYSQKAAIEHELPTATQKLITTNDCILSSVVALTNGAGKIASFFSNNLDYFIASLSYGPKAASGFISPLSAECMLQYKKKAAAYMKSLRKPLLESVPYEEALANRRILLSSTESREGLAQQVQQSLEKISKLEQEKEHWMLEAQLAKIKLEKENQRIADKLKNTGSAQLVGLAQENAAVSNTAGQDEATAKAVLEPIQSTSLIGTLTRTSDSEVPDVESREDLIKNHYMARIVELTSQLQLADSKSVHFYAECRALSKRLALAEKSKEALTEEMKLASQNISRLQDELTTTKRSYEDQLSMMSDHLCSMNETLSKQREEIDTLKMSSKGNSKKNKSR

SEQ ID NO: 575 - protein, 159 aa, Homo sapien
HPGNPEVEEEARRRRRRRLRWPSRQILPDPFPGACLGLGAGDRLSRLGGLACTGRGRPWPRLSCRGSTRSWLRSTRRYPSWSGSRGSPALRPQVAVAATCRDLGVLREGHASAPHLSPQPSPSTITVPPPAAPRRWGRAVSASVSVFAGRSWSLILPFH

SEQ ID NO: 576 - protein, 281 aa, Homo sapien [sequence omitted]

SEQ ID NO: 577 - protein, 133 aa, Homo sapien [sequence omitted]

SEQ ID NO: 578 - protein, 115 aa, Homo sapien
MCLSFHPILTLNPSLFPLGMRSPGTAQGAMMIGTPQCGHHGYMRFQRKRRPGYTNVQQNEAEPPFIGSPQNQRRPLEVLVAEPQSVVDSLIHHCVFRAEVGKLAHRPNPTCHLLL

SEQ ID NO: 579 - protein, 45 aa, Homo sapien
MERKTQRQTRIKRNIKIFFKTLYYYYFGIYPFIGSKNKFSNKIFL

SEQ ID NO: 580 - protein, 65 aa, Homo sapien [sequence omitted]

SEQ ID NO: 581 - protein, 32 aa, Homo sapien [sequence omitted]

SEQ ID NO: 582 - protein, 52 aa, Homo sapien
MLRSSSPVSLISYVKSILANLNTCLGVLQKQEIHFCHIKPCHYILDLFVWAV

SEQ ID NO: 583 - protein, 72 aa, Homo sapien
MKSHKYVGGAEATFLSSVFFTGISRHVEKFCKIYLTGCHQGRCVHTYFSSVKLSKHWRKKLRSNLIRSFALW

SEQ ID NO: 584 - protein, 267 aa, Homo sapien
MGSKALPAPIPLHPSLQLTNYSFLQAVNTFPATVDHLQGLYGLSAVQTMHMNHWTLGYPNVHEITRSTITEMAAAQGLVDARFPFPALPFTTHLFHPKQGAIAHVLPALHKDRPRFDFANLAVAATQEDPPKMGDLSKLSPGLGSPISGLSKLTPDRKPSRGRLPSKTKKEFICKFCGRHFTKSYNLLIHERTHTDERPYTCDICHKAFRRQDHLRDHRYIHSKEKPFKCQECGKGFCQSRTLAVHKTLHMQSRTCSSRELTLLLGD

SEQ ID NO: 585 - protein, 107 aa, Homo sapien
QLQVVYEHRSRLEKSLQKERLEHKKAKEDFLVYKLEAQETLNKGRQDSNSRYSALNVQHQMLKSQHEELKKQHSDLEEEHRKQGEDFSRTFNDHKQKYLLWDLVGCT

SEQ ID NO: 586 - protein, 263 aa, Homo sapien
MFFLKTMPSLQIPRNTFPATVDHLQGLYGLSAVQTMHMNHWTLGYPNVHEITRSTITEMAAAQGLVDARFPFPALPFTTHLFHPKQGAIAHVLPALHKDRPRFDFANLAVAATQEDPPKMGDLSKLSPGLGSPISGLSKLTPDRKPSRGRLPSKTKKEFICKFCGRHFTKSYNLLIHERTHTDERPYTCDICHKAFRRQDHLRDHRYIHSKEKPFKCQECGKGFCQSRTLAVHKTLHMQTSSPTAASSAAKCSGETVICGGTA

SEQ ID NO: 587 - protein, 87 aa, Homo sapien [sequence omitted]

SEQ ID NO: 588 - protein, 49 aa, Homo sapien
MSFCNLSRSLPGARAYAACLPGGQRVALMSLSKWGFWESAASLSFPGAS

SEQ ID NO: 589 - protein, 92 aa, Homo sapien [sequence omitted]

SEQ ID NO: 590 - protein, 20 aa, Homo sapien
MANTQKSITFLYARNKQMDF

SEQ ID NO: 591 - protein, 77 aa, Homo sapien
MLTPSLIFRFDLYVPDLESQLFTASTTDMFLAIVHVHVCISIFSALCSFLFSLNEVSIHPTGKVRNRTLIFSQLLSL

SEQ ID NO: 592 - protein, 77 aa, Homo sapien; identical to SEQ ID NO: 591

SEQ ID NO: 593 - protein, 39 aa, Homo sapien
MSAKSILFPALVSVKGIIIYCHSFIRQYFSSFLFPAPIL

SEQ ID NO: 594 - protein, 25 aa, Homo sapien
MVCVSIRICLSSNLSDLLYFWGFVK

SEQ ID NO: 595 - protein, 64 aa, Homo sapien [sequence omitted]

SEQ ID NO: 596 - protein, 110 aa, Homo sapien [sequence omitted]

SEQ ID NO: 597 - protein, 93 aa, Homo sapien
MSCADLNLGSAVSSCVTFGMLHKSLNLTCKVSTVMVATINNIKVFSSGSDSSKFQGSCFPNSSKFVCFPFHLVYLLESFEEPLESDHQLPILI

SEQ ID NO: 598 - protein, 35 aa, Homo sapien
MPALFFTWKKNPMRRKKNAYNISCIFPQFLKASAY

SEQ ID NO: 599 - protein, 48 aa, Homo sapien
MLPARRLAGAGQRLRPPLRTASHPRSHTLTLPRALSHTHSPPLLLLCY

SEQ ID NO: 600 - protein, 102 aa, Homo sapien
MLVHRVSTMVSTWYSFTLATRGPRLSREWEGESKGTRFSLSQAAPLCPLMLLRPHVLRKRPQIIRGAPVWPERDTLWLCQHRSWDLPNLHFFLCFTSQEMAK

1. An isolated nucleic acid molecule comprising:
(a) a nucleic acid molecule comprising a nucleic acid sequence that encodes an amino acid sequence of SEQ ID NO: 420-600;
(b) a nucleic acid molecule comprising a nucleic acid sequence of SEQ ID NO: 1-419;
(c) a nucleic acid molecule that selectively hybridizes to the nucleic acid molecule of (a) or (b); or
(d) a nucleic acid molecule having at least 95% sequence identity to the nucleic acid molecule of (a) or (b).

2. The nucleic acid molecule according to claim 1, wherein the nucleic acid molecule is a cDNA.

3. The nucleic acid molecule according to claim 1, wherein the nucleic acid molecule is genomic DNA.

4. The nucleic acid molecule according to claim 1, wherein the nucleic acid molecule is an RNA.

5. The nucleic acid molecule according to claim 1, wherein the nucleic acid molecule is a mammalian nucleic acid molecule.

6. The nucleic acid molecule according to claim 5, wherein the nucleic acid molecule is a human nucleic acid molecule.

7. A method for determining the presence of a endometrial specific nucleic acid (ESNA) in a sample, comprising the steps of:
(a) contacting the sample with the nucleic acid molecule of SEQ ID NO: 1-419 under conditions in which the nucleic acid molecule will selectively hybridize to a endometrial specific nucleic acid; and
(b) detecting hybridization of the nucleic acid molecule to a ESNA in the sample, wherein the detection of the hybridization indicates the presence of a ESNA in the sample.

8. A vector comprising the nucleic acid molecule of claim 1.

9. A host cell comprising the vector according to claim 8.

10. A method for producing a polypeptide encoded by the nucleic acid molecule according to claim 1, comprising the steps of:
(a) providing a host cell comprising the nucleic acid molecule operably linked to one or more expression control sequences, and
(b) incubating the host cell under conditions in which the polypeptide is produced.

11. A polypeptide encoded by the nucleic acid molecule according to claim 1.

12. An isolated polypeptide selected from the group consisting of:
(a) a polypeptide comprising an amino acid sequence with at least 95% sequence identity to of SEQ ID NO: 420-600; or
(b) a polypeptide comprising an amino acid sequence encoded by a nucleic acid molecule having at least 95% sequence identity to a nucleic acid molecule comprising a nucleic acid sequence of SEQ ID NO: 1-419.

13. An antibody or fragment thereof that specifically binds to:
(a) a polypeptide comprising an amino acid sequence with at least 95% sequence identity to of SEQ ID NO: 420-600; or
(b) a polypeptide comprising an amino acid sequence encoded by a nucleic acid molecule having at least 95% sequence identity to a nucleic acid molecule comprising a nucleic acid sequence of SEQ ID NO: 1-419.

14. A method for determining the presence of a endometrial specific protein in a sample, comprising the steps of:
(a) contacting the sample with a suitable reagent under conditions in which the reagent will selectively interact with the endometrial specific protein comprising an amino acid sequence with at least 95% sequence identity to of SEQ ID NO: 420-600; and
(b) detecting the interaction of the reagent with a endometrial specific protein in the sample, wherein the detection of binding indicates the presence of a endometrial specific protein in the sample.

15. A method for diagnosing or monitoring the presence and metastases of endometrial cancer in a patient, comprising the steps of:
(a) determining an amount of:
(i) a nucleic acid molecule comprising a nucleic acid sequence that encodes an amino acid sequence of SEQ ID NO: 420-600;
(ii) a nucleic acid molecule comprising a nucleic acid sequence of SEQ ID NO: 1-419;
(iii) a nucleic acid molecule that selectively hybridizes to the nucleic acid molecule of (i) or (ii);
(iv) a nucleic acid molecule having at least 95% sequence identity to the nucleic acid molecule of (i) or (ii);
(v) a polypeptide comprising an amino acid sequence with at least 95% sequence identity to of SEQ ID NO: 420-600; or
(vi) a polypeptide comprising an amino acid sequence encoded by a nucleic acid molecule having at least 95% sequence identity to a nucleic acid molecule comprising a nucleic acid sequence of SEQ ID NO: 1-419 and;
(b) comparing the amount of the determined nucleic acid molecule or the polypeptide in the sample of the patient to the amount of the endometrial specific marker in a normal control; wherein a difference in the amount of the nucleic acid molecule or the polypeptide in the sample compared to the amount of the nucleic acid molecule or the polypeptide in the normal control is associated with the presence of endometrial cancer.

16. A kit for detecting a risk of cancer or presence of cancer in a patient, said kit comprising a means for determining the presence of:
(a) a nucleic acid molecule comprising a nucleic acid sequence that encodes an amino acid sequence of SEQ ID NO: 420-600;
(b) a nucleic acid molecule comprising a nucleic acid sequence of SEQ ID NO: 1-419;
(c) a nucleic acid molecule that selectively hybridizes to the nucleic acid molecule of (a) or (b); or
(d) a nucleic acid molecule having at least 95% sequence identity to the nucleic acid molecule of (a) or (b); or
(e) a polypeptide comprising an amino acid sequence with at least 95% sequence identity to of SEQ ID NO: 420-600; or
(f) a polypeptide comprising an amino acid sequence encoded by a nucleic acid molecule having at least 95% sequence identity to a nucleic acid molecule comprising a nucleic acid sequence of SEQ ID NO: 1-419.

17. A method of treating a patient with endometrial cancer, comprising the step of administering a composition consisting of:
(a) a nucleic acid molecule comprising a nucleic acid sequence that encodes an amino acid sequence of SEQ ID NO: 420-600;
(b) a nucleic acid molecule comprising a nucleic acid sequence of SEQ ID NO: 1-419;
(c) a nucleic acid molecule that selectively hybridizes to the nucleic acid molecule of (a) or (b);
(d) a nucleic acid molecule having at least 95% sequence identity to the nucleic acid molecule of (a) or (b);
(e) a polypeptide comprising an amino acid sequence with at least 95% sequence identity to of SEQ ID NO: 420-600; or
(f) a polypeptide comprising an amino acid sequence encoded by a nucleic acid molecule having at least 95% sequence identity to a nucleic acid molecule comprising a nucleic acid sequence of SEQ ID NO: 1-419;
to a patient in need thereof, wherein said administration induces an immune response against the endometrial cancer cell expressing the nucleic acid molecule or polypeptide.

18. A vaccine comprising the polypeptide or the nucleic acid encoding the polypeptide of claim 12.
